United States Patent Application Publication US 2020/0093870 A1 - sequence listing, part 2

SEQ ID NO: 2438 - DNA, 1358 bp, Artificial Sequence; identical to SEQ ID NO: 624
  Synthetic polymer

SEQ ID NO: 2439 - DNA, 1400 bp, Artificial Sequence; identical to SEQ ID NO: 410
  Synthetic polymer

SEQ ID NO: 2440 - DNA, 1483 bp, Artificial Sequence; identical to SEQ ID NO: 510
  Synthetic polymer

SEQ ID NO: 2441 - DNA, 1400 bp, Artificial Sequence; identical to SEQ ID NO: 533
  Synthetic polymer

SEQ ID NO: 2442 - DNA, 1354 bp, Artificial Sequence; identical to SEQ ID NO: 1050
  Synthetic polymer

SEQ ID NO: 2443 - DNA, 1394 bp, Artificial Sequence; identical to SEQ ID NO: 41
  Synthetic polymer

SEQ ID NO: 2444 - DNA, 1489 bp, Artificial Sequence; identical to SEQ ID NO: 18
  Synthetic polymer

SEQ ID NO: 2445 - DNA, 1482 bp, Artificial Sequence; identical to SEQ ID NO: 1060
  Synthetic polymer

SEQ ID NO: 2446 - DNA, 1452 bp, Artificial Sequence; identical to SEQ ID NO: 1180
  Synthetic polymer

SEQ ID NO: 2447 - DNA, 1450 bp, Artificial Sequence; identical to SEQ ID NO: 1207
  Synthetic polymer

SEQ ID NO: 2448 - DNA, 1363 bp, Artificial Sequence; identical to SEQ ID NO: 1364
  Synthetic polymer

SEQ ID NO: 2449 - DNA, 1481 bp, Artificial Sequence; identical to SEQ ID NO: 1389
  Synthetic polymer

SEQ ID NO: 2450 - DNA, 1462 bp, Artificial Sequence; identical to SEQ ID NO: 890
  Synthetic polymer

SEQ ID NO: 2451 - DNA, 1456 bp, Artificial Sequence; identical to SEQ ID NO: 1441
  Synthetic polymer

SEQ ID NO: 2452 - DNA, 1361 bp, Artificial Sequence; identical to SEQ ID NO: 833
  Synthetic polymer

SEQ ID NO: 2453 - DNA, 1380 bp, Artificial Sequence
  Synthetic polymer
gacgaacgctggcggcgtgcctaatacatgcgagtcgaacgcttctttcctcccgagtgcttgcactcgattggaaagaggagtggcggacgggtgagtaacacgtgagtaacctacccatcagagggggataacacttggaaacaggtgctaataccgcataacaggttatgccgcatggcataacagtgaaaggcgctttcgggtgtcgctgatggatggacccgcggtgcattacctagttggtgaggtaacggctcaccaaggccacgatgcatatccgacctgagagggtgatcggccacactgggactgatacacgggccagactcctacgggaggcagcaatagggaaccttcggcgatggacgaaagtctgaccgagcaacgccgcgtgagtgaagaaccgttttcggatcgtaaaactctgttgttagagaataacaaggacgttagtaactgaacgtcccctgacggtatctaaccagaaagccacggctaactacgtgacatcagccgcggtaatacgtaggtggcaagcgttgtccggatttattgggcggaaagcgagcgcatgcggtttcttaagtctgatgtgaaagcccccggctcaaccggggagggtcattggaaactgggagacttgagtgcagaagaggagagtggaattccatgtgtagcggtgaaatgcgtagatatatggaggaacaccagtggcgaaggcggctctctggtctgtaactgacgctgatgctcgaaagcgtggggagcaaacaggattagataccctggtagtccacgccgtaaacgatgagtgctaagtgttggagggtttccgcccttcagtgctgcagcaaacgcattaagcactccgcctggggagtacgaccgcaaggttgaaactcaaaggaattgacgggggcccgcacaagcggtggagcatgtggtttaattcgaagcaacgcgaagaaccttaccaggtcttgacatcctttgaccactctagagatagagctttcccttccgggacaaagtgacaggtggtgcatggttgtcgtcagctcgtgtcgtgagatgttgggttaagtcccgcaacgagcgcaacccttattgttagttgccatcatttagttgggcgctctagcgagactgccggtgacaaaccggaggaaggtggggatgacgtcaaatcatcatgccccttatgacctgggctacacacgtgctacaatgggaagtacaacgagtcgctagaccgcgaggtcatgcaaatctcttaaagcttctctcagttaggatttcaggctgcaactcgcctgcatgaagcaggaatcgttagaaatcgcggatcagcacgccgcggtgaatacgttcccgggc

SEQ ID NO: 2454 - DNA, 1477 bp, Artificial Sequence
  Synthetic polymer
gacgaacgctggcgtcgtgcgtaatacatgcaagtcgagcgctgatttcctgccggagtgcttgcgctcaattggaaagaggagtggcggacgggtgagtaacacgtgggtaacctacccatcagagggggataacactcagaaacaggtgctaataccgcataacagtttatgccgcatggcataagagtgaaaggcgctttcgggtgtcgctgacggatggacccgcggtgcattagctagttggtgaggtaacggctcaccaaggccacgatgcatagccgacctgagagggtgatcggccacactgggactgagacacggcccagactcctacgggaggcagcagtagggaatcttcggcaatggacgaaagtctgaccgagcaacgccgcgtgagtgaagaaggttttcggatcgtaaaactctgttgttagagaagaacaaggacgttagtaactgaacgtcccctgacggtatctaaccagaaagccacggctaactacgtgccagcagccgcggtaatacgtaggtggcaagcgttgtccggatttattgggcgtaaagcgagcgcaggcggtttcttaagtctgatgtgaaagcccccggctcaaccggggagggtcattggaaactgggagacttgagtgcagaagaggagagtggaattccatgtgtagcggtgaaatgcgtagatatatggaggaacaccagtggcgaaggcggctctctggtctgtaactgacgctgaggctcgaaagcgtggggagcaaacaggattagataccctggtagtccacgccgtaaacgatgagtgctaagtgttggagggtttccgcccttcagtgctgcagcaaacgcattaagcactccgcctggggagtacgaccgcaaggttgaaactcaaaggaattgacgggggcccgcacaagcggtggagcatgtggtttaattcgaagcaacgcgaagaaccttaccaggtcttgacatcctttgaccactctagagatagagctttcccttcggggacaaagtgacaggtggtgcatggttgtcgtcagctcgtgtcgtgagatgttgggttaagtcccgcaacgagcgcaacccttattgttagttgccatcatttagttgggcactctagcgagactgccggtgacaaaccggaggaaggtggggatgacgtcaaatcatcatgccccttatgacctgggctacacacgtgctacaatgggaagtacaacgagtcgctagaccgcgaggtcatgcaaatctcttaaagcttctctcagttcggattgcaggctgcaactcgcctgcatgaagccggaatcgctagtaatcgcggatcagcacgcgcggtggaatacgttcccgggccttgtacacaccgcccgtcacaccacgagagtttgtaacacccgaagtcggtgaggtaacctttttggagccagcgcctaagtgggatagatgatgg

SEQ ID NO: 2455 - DNA, 1392 bp, Artificial Sequence
  Synthetic polymer
  misc_feature (79)..(79): n is a, c, g, or t
  misc_feature (106)..(106): n is a, c, g, or t
tagtggcgaacggtgagtaacacgtggtaactgccatcagcggggataacactgaaaacaggtgctaatccggcatatnccatttccgcatggcagatggataaanggcgcttttgcgtcactgatggatggacccgcgggtgcataagctagttggtggggtaacggcctaccaaggtgcgatgcatagccgacttaagagggtgatcggccacactgggactgagacacggcccagactcctacgggaggcagcagtagggaatcttcgggcaatggacgcaagtctgaccgagcaacgccgcgtgagtgaagaaggttttcggatcgtaaaactctgttgttagagaagaacaaggatgagagtggaaagttcatcccttgacggtatctaaccagaaagccacggctaactacgtgccagcagccgcggtaatacgtaggtggcaagcgttgtccggatttattgggcgtaaagcgagcgcaggcggtcttttaagtctgatgtgaaagcccccggcttaaccggggagggtcattggaaactgggagacttgagtgcagaagaggaaagcggaattccatgtgtagcggtgaaatgcgtagatatatggaggaacaccagtggcgaaggcggctttctggtctgtaactgacgctgaggctcgaaagcgtggggagcaaacaggattagataccctggtagtccacgccgtaaacgatgagtgctaagtgttggagggtttccgcccttcagtgctgcagcaaacgcattaagcactccgcctggggagtacgaccgcaaggttgaaactcaaaggaattgacggggacccgcacaagcggtggagcatgtggtttaattcgaagcaacgcgaagaaccttaccaggtcttgacatcctttgaccatcctagagataggattttcccttcggggacaaagtgacaggtggtgcatggttgtcgtcagctcgtgtcgtgagatgttgggttaagtcccgcaacgagcgcaacccttattgttagttgccatcattcagttgggcactctagcgagactgccgcagacaatgcggaggaaggtggggatgacgtcaaatcatcatgccccttatgacctgggctacacacgtgctacaatggagagtacaacgagtcgcaaagccgcgaggctaagccaatctcttaaagctcttctcagttcggattgtaggctgcaactcgcctacatgaagccggaatcgctagtaatcgcggatcagcacgccgcggtgaatacgttcccgggtcttgtacacaccgcccgtcacaccacgagagtttgtaacacccaaagccggtgcggtaaccgcaaggagccagccgtatagtgggataaatgattggggtg

SEQ ID NO: 2456 - DNA, 1477 bp, Artificial Sequence
  Synthetic polymer
gacgaacgctggcggcgtgcctaatacatgcaagtcgaacgcattgcccattgaagcttgcttcagtggaacgatgagtggcgaacgggtgagtaacacgtgggtaacctgcctatcagcgggggataacacttggaaacaggtgctaataccgcatagatggttgtttcgcatgaaacgacgaggaaagacgctttcgggtgtcactgatagatggacccgcggtgcattagctagatggtgaggtaacggctcaccatggcgatgatgcatagccgacctgagagggtgatcggccacactgggactgagacacggcccagactcctacgggaggcagcagtagggaatcttcggcaatggacgaaagtctgaccgagcaacgccgcgtgagtgaagaaggttttcggatcgtaaaactctgttgtgagagaagaacgggtaggagagtaactgttcctatcgtgacggtatctcaccagaaagccacggctaactacgtgccagcagccgcggtaatacgtaggtggcaagcgttgtccggatttattgggcgtaaagcgagcgcaggcggtttcttaagtctgatgtgaaagcccccggcttaaccggggagggtcattggaaactgggagacttgagtgcagaagaggagagtggaattccatgtgtagcggtgaaatgcgtagatatatggaggaacaccagtggcgaaggcgactctctggtctgtcactgacgctgaggctcgaaagcgtggggagcaaacaggattagataccctggtagtccacgccgtaaacgatgagtgctaagtgttagggggtttccgccccttagtgctgcagctaacgcattaagcactccgcctggggagtacgaccgcaaggttgaaactcaaaggaattgacgggggcccgcacaagcggtggagcatgtggtttaattcgaagcaacgcgaagaaccttaccaggtcttgacatcctttgaccactctagagatagagccttcccttcggggacaaagagacaggtggtgcatggttgtcgtcagctcgtgtcgtgagatgttgggttaagtcccgcaacgagcgcaacccttattgttagttgccatcatttagttgggcactctagcgaaactgccggtgacaaaccggaggaaggtggggatgacgtcaaatcatcatgccccttatgacctgggctacacacgtgctacaatggacagtacaatgagcagcgacacggcgacgtgaagcgaatctcataaagctgttctcagttcggattgcaggctgcaactcgcctgcatgaagccggaatcgctagtaatcgcggatcagcacgccgcggtgaatacgttcccgggccttgtacacaccgcccgtcacaccacgagagtttgtaacacccgaagtcggtgaggtaaccagttggagccagccgcctaaggtgggatagatgattggggtg

SEQ ID NO: 2457 - DNA, 1479 bp, Artificial Sequence
  Synthetic polymer
atacatgcaagtcgaacgcttctttcctcccttgtgcttgcactcaattggaaagaggagtggcggacgggtgagtaacacgtgggtaacctacccatcagagggggataacacttggaaacaggtgctaataccgcataacagtttatgccgcatggcataagagtgaaaggcgctttcgggtgtcgctgatggatggacccgcggtgcattagctagttggtgaggtaacggctcaccaaggccacaatgcatagccgacctgagagggtgatcggccacactgggactgaaacacggcccaaactcctacgggaggcagcagtacggaatcttcggcaatggacgaaagtctgaccgagcaacgccgcgtgagtgaagaaggttttcggatcgtaaaactctgttgttagagaagaacaaggacgttagtaactgaacgtcccctgacggtatctaaccagaaagccacggctaactacgtgccagcagccgcggtaatacgtaggtggcaagcgttgtccggatttattgggcgtaaagcgagcgcaggcggtttcttaagtctgatgtgaaagcccccggctcaaccggggagggtcattggaaactgggagacttgagtgcagaagaggagagtggaattccatgtgtagcggagatatgcgtaaatatatggaggaacaccagtggcgaaggcggctctctggtctgtaactgacgctgaggctcgaaagcgtggagagcaaacaggattagataccctggtagttcacacccttaaacgatgagtgttaagttgttgggagtgttttccccatttcagtggttcagcaaacgcattatagcaactccgcctggggagtacgaccgcaaggttgaaattcaaaggaattgacggggacccgcacaagcggtggagcatgtggtttaattcgaagcaacgcgatgaaccttaccaggtcttgacatcctttgaccactctagagatagagctttcccttcggggacaaagtgacaggtggtgcatggttgtcgtcagctcgtgtcgtgagatgttgggttaagtcccgcaacgagcgcaacccttattgttagttgccatcatttagttgggcactctagcgagactgccggtgacaaaccggaggaaggtggggatgacgtcaaatcatcatgccccttatgacctgggctacacacgtgctacaatgggaagtacaacgagtcgatagaccgcgaggtcatgcaaatctcttaaagcttctatcagtttggattgcaggatgcaactcgcctgcatgaagccggaatcgctagtaatcgcggatcagcacgccgcggtgaatacgttcccgggccttgtacacaccgcccgtcacaccacgagagtttgtaacacccgaagtcggtgaggtaacctttttggagccagccgcctaaggtgggatagatgattggggtgaagtcataacaag

SEQ ID NO: 2458 - DNA, 1379 bp, Artificial Sequence
  Synthetic polymer
  misc_feature (38)..(38): n is a, c, g, or t
  misc_feature (42)..(42): n is a, c, g, or t
  misc_feature (351)..(351): n is a, c, g, or t
  misc_feature (353)..(354): n is a, c, g, or t
  misc_feature (491)..(491): n is a, c, g, or t
  misc_feature (530)..(530): n is a, c, g, or t
  misc_feature (897)..(897): n is a, c, g, or t
  misc_feature (957)..(959): n is a, c, g, or t
  misc_feature (962)..(962): n is a, c, g, or t
  misc_feature (1322)..(1323): n is a, c, g, or t
aaagggtgagtaacacgtgggtaacctgcccatcagancgtnataacacttggaaacaggtgctaataccgtataacaatcgaaaccgcatggtttcggtttgaaaggcgcttttgcgtcactgatggatggacccgcggtgcattagctagttggtgaggtaacggctcaccaaggcaacgatgcatagccgacctgagagggtgatcggccacattgggactgagacacggcccaaactcctacgggaggcagcagtagggaatcttcggcaatggacgcaagtctgaccgagcaacgccgcgtgagtgaagaaggttttcggatcgtaaaactctgttgttagagaananntttggatgagagtagaatgttcatcccttgacggtatctaaccagaaagccacggctaactacgtgccagcagccgcggtaataccgtaggtggcaagcgttgtccggatttattgggcgtaaagcgagcgcaggcnggtttcttaagtctgatgtgaaagcccccggctcaaccnggggagggtcattggaaactgggaaacttgagtgcagaagaggagagtggaattccatgtgtagcggtgaaatgcgtagatatatggaggaacaccagtggcgaaggcggctctctggtctgtaactgacgctgaggctcgaaagcgtggggagcaaacaggattagataccctggtagtccacgccgtaaacgatgagtgctaagtgttggagggtttccgcccttcagtgctgcagctaacgcattaagcactccgcctggggagtacgaccgcaaggttgaaactcaaaggaattgacgggggcccgcacaagcggtggagcatgtggtttaattcgaagcaacgcgaagaaccttaccagggncttgacatccttttgaccactctaaagatagagcttccccttcgggggcaaagtgacagnnnaancatggttgtcgtcagctcgtgtcgtgagatgttgggttaagtcccgcaacgagcgcaacccttattgttagttgccatcatttagttgggcactctagcgagactgccggtgacaaaccggaggaaggtggggatgacgtcaaatcatcatgccccttatgacctgggctacacacgtgctacaatgggaagtacaacgagtcgcgaagtcgcgaggctaagctaatctcttaaagcttctctcagttcggattgtaggctgcaactcgcctacatgaagccggaatcgctagtaatcgcggatcttcttaaaggcggtgaatacgttcccgggccttgtacacaccgccttttaagggnncgagagtttgtaacacccgaagtcggtgaggtaacctttggagccagccgcctaag

SEQ ID NO: 2459 - DNA, 1421 bp, Artificial Sequence; identical to SEQ ID NO: 598
  Synthetic polymer

SEQ ID NO: 2460 - DNA, 1344 bp, Artificial Sequence
  Synthetic polymer
ggcgaacgggggaggaacacgggggcaacctgcccatcagaaggggataacacttggaaacaggcgctaataccgtataacaatcgaaaaagaaaggatttgatttgaaaggcgctttcgggtgtcgctgatggatggacccgcggtgcattagctagttggtgaggtaacggctcaccaaggccgcgatgcatagccgacctgagagggtgatcggccacattgggactgagacacggcccaaactcctacgggaggcagcagtagggaatcttcggcaatggacgaaagtctgaccgagcaacgccgcgtgagggaggaagggcgacggaacgaaaaactctgttgttagagaagaacaaggatgagagtaactgttcatcccttgacggtatctaaccagaaagccacggctaactacgtgccagcagccgcggtaatacgtaggtggcaagcgttgtccggatttattgggcgtaaagcgagcgcaggcggtttcttaagtctgatgtgaaagcccccggctcaaccggggagggtcattggaaactgggagacttgagtgcagaagaggagagtggaattccatgtgtagcggggaaatgcgtagatatatggaggaacaccagtggcgaaggcggctctctggtctgtaactgacgctgaggctcgaaagcgtggggagcaaacaggattagataccctggtagtccacgccgtaaacgatgagtgctaagtgttggagggtttccgcctttcagtgctgcagctaacgcattaagcactccgcctggggagtacaaccgcaaggttgaaactcaaaggaattgacgggggcccgcacaagcggtggagcatgtggtttaattcgaagcaacgcgaagaaccttaccaggtcttgacatcctttgaccactctagagatagagcttccccttcgggggcaaagtgacaggtggtgcatggttgtcgtcagctcgtgtcgtgagatgttgggttaagtcccgcaccgagcgcaacccttattgttagttgccatcattcagttgggcactctagcaagactgccggtgacaaaccggaggaaggtggggatgacgtcaaatcatcatgccccttatgacctgggctacacacgtgttacaatgggaagtacaacgagtcgcgaagtcgcgaggctaagctaatctcttaaagcttctctcagttcggattgcaggctgcaactcgcctgcatatcgccggaatcgctagtaatcgcggatcagcacgccgcggtgaatacgttcccgggccttgtacacaccgcccgtcacaccacgagagtttgtaactcccgaagtc

SEQ ID NO: 2461 - DNA, 1363 bp, Artificial Sequence
  Synthetic polymer
tagcacgtggggaacgtgcccttcaaaaggggataacacgggttaactggtgctaataccgtataacaagcgaaaccgcgtggttttgatttgaagggcggtttcgggtggtgttgatggatggtccggcggtgcattatctaggtggtgaggtaacggctcaccaaggccacggtgcatagccgacctgagagggtgatcggccacattgggactgagacacggtccaaacttatacgggaggcagcagtagggaatcttcggcaatggacgaaagtctgaccgagcaacgccgcgtgagtgaagaaggttttcggatcgtaaaactctgttgctagagaagaacaaggatgagagtaactgttcatcccttgacggtatctaaccagaaagccacggctaactacgtgccagcagccgcggtaatacgtaggtggcaagcgttgtccggatttattgggcgtaaagcgagcgcaggcggtttcttaagtctgatgtgaaagcccccggctcaaccggggagggtcattggaaactgggagacttgagtgcagaagaggagagtggaattccatgtgtagcggtgaaatgcgtagatatatggaggaacaccagtggcgaaggcggctctctggtctgtaactgacgctgaggctcgaaagcgtggggagcaaacaggattagataccctggtagtccacgccgtaaacgatgagtgctaagtgttggagggtttccgcccttcagtgctgcagctaacgcattaagcactccgcctggggagtacgaccgcaaggttgaaactcaaaggaattgacgggggcccgcacaagcggtggagcatgtggtttaattcgaagcaacgcgaagaaccttaccaggtcttgacatcctttgaccactctagagatagagcttccccttcgggggcaaagtgacaggtggtgcatggttgtcgtcagctcgtgtcgtgagatgttgggttaagtcccgcaacgagcgcaacccttattgttagttgccatcattcagttgggcactctagcaagactgccggtgacaaaccggaggaaggtggggatgacgtcaaatcatcatgccccttatgacctgggctacacacgtgctacaatgggaagtacaacgagttgcgaagtcgcgaggctaagctaatctcttaaagcttctctcagttcggattgcaggctgcaactcgcctgcatgaagccggaatcgctagtaatcgcggatcagcacgccgcggtgaatacgttcccgggccttgtacacaccgcccgtcacaccacgagagtttgtaacacccgaagtcggtgaggtaacctttttggagccagccgcctaa

SEQ ID NO: 2462 - DNA, 1419 bp, Artificial Sequence
  Synthetic polymer
gagtggcgaacgggtgagtaacacgtgggtaacctgcccttcaatgggggataacacttggaaacaggtgctaataccgcataacaatgattgtctcatggcagttatttgaaagacgctttacggtgtcgttgaaggatggacccgcggtgcattagctagttggtgaggtaacggctcaccaaagccttgatgcatagccgacctgagagggtgatcggccacactgggactgagacacggcccagactcctacgggaggcagcagtagggaatcttcggcaatggacgaaagtctgaccgagcaacgccgcgtgagtgaagaaggttttcggatcgtaaaactctgttgttagagaagaacaagggtgagagtaactgttcaccccttgacggtatctaaccagaaagccacggctaactacgtgccagcagccgcggtaatacgtaggtggcaagcgttgtccggatttattgggcgtaaagcgagcgcaggcggtttcttaagtctgatgtgaaagcccccggcttaaccggggagggtcattggaaactgggaaacttgagtgcagaagaggagagtggaattccatgtgtagcggtgaaatgcgtagatatatggaggaacaccagtggcgaaggcggctctctggtctgtaactgacgctgaggctcgaaagcgtggggagcaaacaggattagataccctggtagtccacgccgtaaacgatgagtgctaagtgttggagggtttccgcccttcagtgctgcagctaacgcattaagcactccgcctggggagtacgaccgcaaggttgaaactcaaaggaattgacgggggcccgcacaagcggtggagcatgtggtttaattcgacgcaacgcgaagaaccttaccaggtcttgacatcctttgaccattctggagacagaactttcccttcggggacaaagtgacaggtggtgcatggttgtcgtcagctcgtgtcgtgagatgttgggttaagtcccgcaacgagcgcaacccttattgttagttgccatcatttagttgggcactctagcgagactgccggtgacaaaccggaggaaggtggggatgacgtcaaatcatcatgccccttatgacctgggctacacacgtgctacaatgggaagtacaacgagtcgcaaagtcgcaaggctaagctaatctcttaaagcttctctcagttcggattgtaggctgcaactcgcctacatgaagctggaatcgctagtaatcgcggatcagcacgccgcggtgaatacgttcccgggccttgtacacaccgcccgtcacaccacgagagtttgtaacgcccgaagtcggtgaggtaaccttttaggagccagccgcctaaggtgggatagatgattggggtgaagtcgtaacaaggta

SEQ ID NO: 2463 - DNA, 1453 bp, Artificial Sequence
  Synthetic polymer
ggcgtgcctaatacatgcaagtcgaacgcttcttttccaccggacttcggtccaccggaaaagaggagtggcggacgggtgagtaacacgtgggtaacctgcccatcagcgggggataacatttggaaacagatgctaataccgcatagatgtcaaaaccgcatggttttgaccggaaagacgctttcgggtgtcgctgatggatggacccgcggtgcattagttagttggcgaggtaacggctcaccaagacgatgatgcatagccgacctgagagggtgatcggccacactgggactgagacacggcccagactcctacgggaggcagcagtagggaatcttcggcaatggacgaaagtctgaccgagcaacgccgcgtgagtgaagaaggttttcggatcgtaaaactctgttgtcagagaagaacagggataagagtaactgtttatcccgtgacggtatctgaccagaaagccacggctaactacgtgccagcagccgcggtaatacgtaggtggcaagcgttgtccggatttattgggcgtaaagcgagcgcaggcggtcttttaagtctgatgtgaaagcccccggcttaaccggggagggtcattggaaactgggagacttgagtgcagaagaggagagtggaattccatgtgtagcggtgaaatgcgtagatatatggaggaacaccagtggcgaaggcggctctctggtctgtaactgacgctgaggctcgaaagcgtggggagcaaacaggattagataccctggtagtccacgccgtaaacgatgagtgctaagtgttggagggtttccgcccttcagtgctgcagctaacgcattaagcactccgcctggggagtacgaccgcaaggttgaaactcaaaggaattgacgggggcccgcacaagcggtggagcatgtggtttaattcgaagcaacgcgaagaaccttaccaggtcttgacatcctttgaacgctctagagatagagtttccccttcgggggcaaagtgacaggtggtgcatggttgtcgtcagctcgtgtcgtgagatgttgggttaagtcccgcaacgagcgcaacccttattgctagttgccatcattcagttgggcactctagcgagactgccggtgacaaaccggaggaaggtggggatgacgtcaaatcatcatgccccttatgacctgggctacacacgtgctacaatggagagtacagagagccgcaaagccgcgaggccaagcaaatctcataaagctcttctcagttcggattgcaggctgcaactcgcctgcatgaagtcggaatcgctagtaatcgcggatcagcatgccgcggtgaatacgttcccgggccttgtacacaccgcccgtcacaccacgagagtttgtaacacccaaagccggtgaggcaaccttcgggagccagccgtctaaggtgggac

SEQ ID NO: 2464 - DNA, 1501 bp, Artificial Sequence
  Synthetic polymer
gacgaacgctggcggcgtgcctaatacatgcaagtcgaacgcttctttcctcccgagtgcttgcactcaattggaaagaggagtggcggacgggtgagtaacacgtgggtaacctacccatcaaagggggtaaagccttgaaaagccgtggcaattcccgcctagccttttatgcccgcctgggccttacgattgaaagggcgtttgccgttgtgccgtgatggattgagcccgccttgccttacgctacttggtgaggtaagccgctccgccaagggccaccatggcttagcctacctaacagcatgaatgcaccagcatgggaagctgagagcgcggcccagagtgctagcgcgaggcagcagtagggaatgctgcggcaatggaacgaaattctgaccgagcaacgccgcgtgagtgaagaaggttttcggatcgtaaaactctgttgttagagaagaacaaggactttagtaactgaagcgtcccgctgacggtatctaaccagaaagccacggctaactacgttccagcagccgcggtaatacgtaggttgcaagcgttttccggatttattgggcgtaaagcgagcgcaggcggtttcttaagtctgatgtgaaagcccccggctcaaccggggagggtcattggaaactgggagacttgagtgcagaagaggagagtggaattccatgtgtagcggtgaaatgcgtagatatatggaggaacaccagtggcgaaggcggctctctggtctgtaactgacgctgaggctcgaaagcgtggggagcaaacaggattagataccctggtagtccacgccgtaaacgatgagtgctaagtgttggagggtttccgcccttcagtgctgcagcaaacgcattaagcactccgcctggggagtacgaccgcaaggttgaaactcaaaggaattgacgggggcccgcacaagcggtggagcatgtggtttaattcgaagcaacgcgaagaaccttaccaggtcttgacatcctttgaccactctagagatagagctttcccttcggggacaaagtgacaggtggtgcatggttgtcgtcagctcggtcgtgagatgttgggttaagtcccgcaacgagcgcaacccttattgttagttgccatcatttagttgggcactctagcgagactgccggtgacaaaccggaggaaggtggggatgacgtcaaatcatcatgccccttatgacctgggctacacacgtgctacaatgggaagtacaacgagtcgctagaccgcgaggtcatgcaaatctcttaaagcttctctcagttcggattgcaggctgcaactcgcctgcatgaagccggaatcgctagtaatcgcggatcagcacgccgcggtgaatacgttcccgggccttgtacacaccgcccgtcacaccacgagagtttgtaacacccgaagtcggtgaggtaacctttttggagccagcagcctaaggtgggatagatgattgggg

SEQ ID NO: 2465 - DNA, 1421 bp, Artificial Sequence
  Synthetic polymer
agagtttgatcctggctcaggacgaacgctggcggcgtgcctaatacatgcaagtcgaacgcattttctttcaccgtagcttgctacaccgaaagaaaatgagtggcgaacgggtgagtaacacgtgggtaacctgcccatcagcgggggataacactaggaaacaggtgctaataccgcataatttcatttaccgcatggtaaatggatgaaaggcgcttttgcgtcactgatggatggacccgcggtgcattagctagttggtggggtaacggcctaccaaggctgcgatgcatagccgacctgagagggtgatcggccacactgggactgagacacggcccagactcctacgggaggcagcagtagggaatcttcggcaatggacgcaagtctgaccgagcaacgccgcgtgagtgaagaaggttttcggatcgtaaaactctgttgttagaaaagaacaaggatgagagtggaaagttcatcccttgacggtatctaaccagaaagccacggctaactacgtgccagcagccgcggtaatacgtaggtggcaagcgttgtccggatttattgggcgtaaagcgagcgcaggcggtcttttaagtctgatgtgaaagcccccggcttaaccggggaggggtcattggaaactgggagacttgagtgcagaagaggaaagcggaattccatgtgtagcggtgaaatgcgtagatatatggaggaacaccagtggcgaaggcggctttctggtctgtaactgacgctgaggctcgaaagcgtggggagcaaacaggattagataccctggtagtccacgccgtaaaacgatgagtgctaagtgttggagggtttccgcccttcagtgctgcagcaaacgcattaagcactccgcctggggagtacgaccgcaaggttgaaactcaaaggaattgacggggacccgcacaagcggtggagcatgtggtttaattcgaagcaacgcgaagaaccttaccaggtcttgacatcctttgaccatcctagagataggactttcccttcggggacaaagtgacaggtggtgcatggttgtcgtcagctcgtgtcgtgagatgttgggttaagtcccgcaacgagcgcaacccttattgttagttgccatcatttagttgggcactctagcgagactgccgcagacaatgcggaggaaggtggggatgacgtcaaatcatcatgccccttatgacctgggctacacacgtgctacaatggagagtacaacgagtcgcaaagccgcgaggctaagccaatctcttaaagctcttctcagttcggattgtaggctgcaactcgcctacatgaagccggaatcgctagtaatcgcggatcagctatgctacggtgaatacgttcccgggtcttgcacacaccgcccgtca

SEQ ID NO: 2466 - DNA, 1410 bp, Artificial Sequence
  Synthetic polymer
gagtttgatcctggctcaggacgaacgctggcggcgtgcctaatacatgcaagtcgaacgcgactttaaaagagcttgctctttgaaaagtcgagtggcggacgggtgagtaacacgtgggtaacctaccctttagcgggggataacacttggaaacaggtgctaataccgtataataattttattcgcatggatgaaatttgaaagacgctttacggtgtcactaaaggatggacccgcggtgcattagttagttggtgaggtaacggctcaccaagaccgtgatgcatagccgacctgagagggtgatcggccacactgggactgagacacggcccagactcctacgggaggcagcagtagggaatcttcggcaatggacgaaagtctgaccgagcaacgccgcgtgagtgaagaaggttttcggatcgtaaaactctgttgttagagaagaacaaggatgagagtaactgttcatcccttgacggtatctaaccagaaagccacggctaactacgtgccagcagccgcggtaatacgtaggtggcaagcgttgtccggatttattgggcgtaaagcgagcgcaggcggtttcttaagtctgatgtgaaagcccccggcttaaccggggagggtcattggaaactggggaacttgagtgcagaagaggagagtggaattccatgtgtagcggtgaaatgcgtagatatatggaggaacaccagtggcgaaggcggctctctggtctgtaactgacgctgaggctcgaaagcgtggggagcaaacaggattagataccctggtagtccacgccgtaaacgatgagtgctaagtgttggagggtttccgcccttcagtgctgcagctaacgcattaagcactccgcctggggagtacgaccgcaaggttgaaactcaaaggaattgacgggggcccgcacaagcggtggagcatgtggtttaattcgaagcaacgcgaagaaccttaccaggtcttgacatcctttgaccactctagagatagagctttcccttcggggacaaagtgacaggtggtgcatggttgtcgtcagctcgtgtcgtgagatgttgggttaagtcccgcaacgagcgcaacccttattgttagttgccatcatttagttgggcactctagcgagactgccggtgacaaaccggaggaaggtggggatgacgtcaaatcatcatgccccttatgacctgggctacacacgtgctacaatgggaagtacaacgagtcgcgaaatcgcaagatcaagctaatctcttaaagcttctctcagttcggattgtaggctgcaactcgcctacatgaagtcggaatcgctagtaatcgcggatcagcacgccgcggtgaatacgttcccgggccttgtacacaccgcccgtc

SEQ ID NO: 2467 - DNA, 1535 bp, Artificial Sequence
  Synthetic polymer
  misc_feature (187)..(187): n is a, c, g, or t
  misc_feature (351)..(351): n is a, c, g, or t
gagtttgatcctggctcaggacgaacgctggcggcgtgcctaatacatgcaagtcgaacgcttctttcctcccgagtgcttgcactcaattggaaagaggagtggcggacgggtgagtaacacgtgggtaacctacccatcagagggggataacacttggaaacaggtgcctaatacctcataacanatttatgcctcgatggcataaggattgaaatgcgctttctgggtgtcgctgatggatggaccctgcggtgcattacgctattttggtgaggtaacggctcaccaatgccactgatgcataaccgacctgcgagggtgatcggccaccctgggactgagacacgncccacgactcctaccgccaggcagcagtaaggaatcttcaatcatggacgagagtctaacctcagcaacgccccgtgagtgaagaatgttttcggatcttaaaactctgttgtaagataataacaaggacgttatgtaactgatcgtcccctgacggtatctaacctttaaagccacggctaactacttgccacgtgccgcggtaatacgtaggtggcaagcgttgtccggatttattgggcgtaaagcgagcgcaggcggtttctttaagttgatgtgaaagcccccggctcaaccggggagggtcattgggaaactgggacacttgagtgcagaagaggagagtggaattccatgtgtagcggtgaaatgcgtagatatatggaggaacaccagtggcgaaggcggctctctggtctgtaactgacgctgaggctcgaaagtgtggggagcaaacaggattagataccctggtagtccacgccgtaaacgatgagtgctaagtgttggagggtttccgcccttcagtgctgcagcaaacgcattaagcattccgcctggggagtacgaccgcaaggttgaaactcaaaggaattgacgggggcccgcacaagcggtggagcatgtggtttaattcgaagctacgcgaagaaccttaccaggtcttgacatcctttgaccattttagagatagagctttcccttcggggacaaagggacaggtggtgcatggttgtcgtcagctcgtgtcgtgagatgttgggttaagtcccgcaacgagcgcaacccttattgttagttgccatcatttagttgggcactctagcgagactgccggtgacaaaccggaggaaggtggggatgacgtcaaatcatcatgccccttatgacctgggctacacacgtgctacaatgggaagtacaacgagtcgctagcccgcgaggtcatgcaaatctcttaaagcctctctcagttcggattgcaggctgcaactcgcctgcatgaagccggaatcgctagtaatcgcggatcagcacgccgcggtgaatacgttcccgggccttgtacacaccgcccgtcacaccacgagagtttgtaacacccgaagtcggtgaggtaacctttttggagccagccgcctaaggtgggatagatgattggggtgaagtcgtaacaaggtaac

SEQ ID NO: 2468 - DNA, 1512 bp, Artificial Sequence; identical to SEQ ID NO: 920
  Synthetic polymer

SEQ ID NO: 2469 - DNA, 1480 bp, Artificial Sequence
  Synthetic polymer
ttagagtttgattcctggctgaggacgaacgctggcggcgtgcctaatacatgcaagtcgaacgctttttctttcaccggagcttgctccaccgaaagaaaaagagtggcgaacgggtgagtaacacgtgggtaacctgcccatcagaaggggataacacttggaaacaggtgctaataccgtataacactattttccgcatggaagaaagttgaaaggcgcttttgcgtcactgatggatggacccgcggtgcattagctagttggtgaggtaacggctcaccaaggcaacgatgcatagccgacctgagagggtgatcggccacactgggactgagacacggcccagactcctacgggaggcagcagtagggaatcttcggcaatggacgaaagtctgaccgagcaacgccgcgtgagtgaagaaggttttcggatcgtaaaactctgttgttagagaagaacaaggatgagagtaaaacgttcatcccttgacggtgtctaaccagaaagccacggctaactacgtgccagcagccgcggtaatacgtaggtggcaagcgttgtccggatttattgggcgtaaagcgagcgcaggcggtttcttaagtctgatgtgaaagcccccggctcaaccggggagggtcattggaaactgggagacttgagtgcagaagaggagagtggaattccatgtgtagcggtgaaatgcgtagatatatggaggaacaccagtggcgaaggcggctctctggtctgtaactgacgctgaggctcgaaagcgtggggagcgaacaggattagataccctggtagtccacgccgtaaacgatgagtgctaagtgttggagggtacaggattagataccctggtagtccacgccgtaaacgatgagtgctaagtgttggagggtttccgcccttcagtgctgcagcaaacgcattaagcactccgcctggggagtacgaccgcaaggttgaaactcaaaggaattgacgggggcccgcacaagcggtggagcatgtggtttaattcgaagcaacgcgaagaaccttaccaggtcttgacatcctttgaccactctagagatagagcttccccttcgggggcaaagtgacaggtggtgcatggttgtcgtcagctcgtgtcgtgagatgttgggttaagtcccgcaacgagcgcaacccttattgttagttgccatcatttagttgggcactctagcgagactgccggtgacaaaccggaggaaggtggggatgacgtcaaatcatcatgccccttatgacctgggctacacacgtgctacaatgggacagtacaacgagttgcgaagtcgcgaggctaagctaatctcttaaagcttctctcagttcggattgtaggctgcaactcgcctacatgaagccggaatcgctagtaatcgcggatcagcacgccgcggtgaatacgttcccgggccttgtacacaccgcccgt

SEQ ID NO: 2470 - DNA, 1483 bp, Artificial Sequence
  Synthetic polymer
acatgcaagtcgaacgctttttctttcaccggagcttgctccaccgagagaaaaagagtggcgaacgggtgagtaacacgtgggtaacctgcccaccagaaggggataacacttggaaacaggtgctaataccgtataataagtaaaaccgcatggttttactttgaaaggcgcttttgcgtcactggtggatggacccgcggtgcattagctagttggtgaggtaacggctcaccaaggcaacgatgcatagccgacctgagagggtgatcggccacattgggactgagacacggcccaaactcctacgggaggcagcagtagggaatcttcggcaatggacgaaagtctgaccgagcaacgccgcgtgagtgaagaaggttttcggatcgtaaaactctgttgttagagaagaacaaggatgagagtaaaacgttcatcccttgacggtatctaaccagaaagccacggctaactacgtgccagcagccgcggtaatacgtaggtggcaagcgttgtccggatttattgggcgtaaagcgagcgcaggcggtttcttaagtctgatgtgaaagcccccggctcaaccggggagggtcattggaaactgggaaacttgagtgcagaagaggagagtggaattccatgtgtagcggtgaaatgcgtagatatatggaggaacaccagtggcgaaggcggctctctggtctgtaactgacgctgaggctcgaaagcgtggggagcaaacaggattagawaccctggtagtccacgccgtaaacgatgrgtgctaagtgttggagggtttccgcccttcagtgctgcagctaacgcattaagcactccgcctggggagtacgaccgcaaggttgaaactcaaaggaattgacgggggcccgcacaagcggtggagcatgtggtttaattcgaagcaacgcgaagaaccttaccaggtcttgacatcctttgaccactctagagatagagcttccccttcgggggcaaagtgacaggtggtgcatggttgtcgtcagctcgtgtcgtgagatgttgggttaagtcccgcaacgagcgcaacccttattgttagttgccatcatttagttgggcactttatcgagactgccggtgacaaaccggaggaaggtgggggtggaggtggggatcatcatgccccttatgacctgggctacacacgtgctacaatgggaagtacaacgagttgcgaagtcgcgaggctaagctaatctcttaaagcttctctcagttcggattgtaggctgcaactcgcctacatgaagccggaatcgctagtaatcgcggatcagcacgccgcggtgaatacgttcccgggccttgtacacaccgcccgtcacaccacgagagtttgtaacacccgaagccggtgaggtaaccttttggagccagccgtctaaagtgggatagatgattggggtgaagtcgtaacaaggtagccgtatcg

SEQ ID NO: 2471 - DNA, 1471 bp, Artificial Sequence
  Synthetic polymer
ctggcggcgtgcctaatacatgcaagtcgaacgcatttttctttcaccggagcttgctccaccgaaagaaaaagagtggcgaacgggtgagtaacacgtgggtaacctgcccatcacaaggggataacacttggaaacaggtgctaataccgtataacactattttccgcatggaagaaagttgaaaggcgcttttgcgtcactgatggatggacccgcggtgcattagctagttggtgaggtaacggctcaccaaggccacgatgcatagccgacctgagagggtgatcggccacactgggactgatacacggcccagactcctacgggaggcagcagaagggaatcttcggcaatggacgaaagtctgaccgagcaacgccccgtgagtgaagaaggttttcggatcgtaaaactctgttgttagagaagaacaaggatgagagtagaacgttcatcccttgacggtatctaaccagaaagccacggctaactacgtgccagcagccgcggtaatacgtaggtggcaagcgttgtccggatttattgggcgtaaagcgagcgcaggcggtttcttaagtctgatgtgaaagcccccggctcaaccggggaaggtcattggaaactgggagacttgagtgcagaagatgagagtggaattccatgtgtatcgctgaaatgcgtacatatatggaggaacaccagtggccaacgcggctctctggtctgtaactgacgctgaggctcgaaagcgtggggagcgaacaggattagataccctggtagtccacgccgtaaacgatgagtgctaagtgttggagggtttccgcccttcagtgctgcagcaaacgcattaagcaccccgcctggggagtacgaccgcaaggttgaaactcaaaggaattgacgggggcccgcacaagcggtggagcatgtggtttaattcgaagcaacgcgaagaaccttaccaggtcttgacatcctttgaccactctagagatagagtttccccttcgggggcaaagtgacaggtggtgcatggttgtcgtcagctcgtgtcgtgagatgttgggttaagtcccgcaacgagcgcaacccttattgttagttgccatcatttagttgggcactctagcgagactgccggtgacaaaccggaggaaggtggggatgacgtcaaatcatcatgccccttatgacctgggctacacacgtgctacaatgggaagtacaacgagttgcgaagtcgcgaggctaagctaatctcttaaagcttctctcagttcggattgtaggctgcaactcgcctacatgaagccggaatcgctagtaatcgcggatcagcacgccgcggtgaatacgttcccgggccttgtacacaccgcccgtcacaccacgagagtttgtaacacccgaagtcggtgaggtaacctttttggagccagccgcctaaggtgggatagatgaatgg

SEQ ID NO: 2472 - DNA, 1356 bp, Artificial Sequence; identical to SEQ ID NO: 811
  Synthetic polymer

SEQ ID NO: 2473 - DNA, 1539 bp, Artificial Sequence
  Synthetic polymer
tggagagtttgatcctggctcaggacgaacgctggcggcgtgcctattacatgcaagtcgaacgcttctttttccaccggagcttgctcccccggaaaaagaggagtggcgaacgggtgagtaacacgtgggtaacctgcccatcagaaggggataacacttggaaacaggtgctaataccgtataacaatcaaaaccgcatggttttgatttgaaaggggctttcgggtgtcgctgatggatggacccgcggtgcattagctagttggtgaggtaacggctcaccaaggccacgatgcatagccgacctgagagggtgatcggccacattgggactgagacacggcccaaactcctacgggaggcagcagtagggaatcttcggcaatggacaaaagtctgaccgaacaacgccgcgtgagtgaaagaaggttttcggatcgtaaaactctgttgttagagaagacaaggatgagagtaactgttcatcccttgacggtatctaaccagaaagccacggctaactacgtgccagcagccgcggtaatacgtaggtggcaagcgttgtccggatttattgggcgtaaagcgagcgcaggcggtttcttaagtctgatgtgaaagcccccggctcaaccggggagggtcattggaaactgggagacttgagtgcagaagaggagagtggaattccatgtgtagcggtgaaatgcgtagatatatggaggaacaccagtggcgaaggcggctctctggtctgtaactgacgctgaggctcgaaagcgtggggagcaaacaggattagataccctggtagtccacgccgtaaacgatgagtgctaagtgttggagggtttccgcccttctctgctgcttttaacgcattaagcactccgcctggggagtacgaccgcagggttgaaactcaaggaattgacgggggcccgcacaagcggtggagcatgtggtttaattcgaagcaacgcgaagaaccttaccaggtcttgacatcctttgaccactctagagatagagcttccccttcgggggcaaagtgacaggtggtgcatggttgtcgtcagctcgtgtcgtgagatgttgggttaagtcccgcaacgagcgcaacccttattgttagttgccatcattcagttgggcactttagcaagactgccggtgacaaaccggaggaaggtggggatgacgtcaaatcatcatgccccttatgacctgggctacacacgtgttacaatgggaagtacaacgagttgcgaagtcgcgaggttaagttaattttttaaagcttttttcagttcggattgcaggctgcaactcgcctgcaggaagccggaatcgttagtaatcgcggatcagcacgccgcggtgaatacgttcccgggccttgtacccaccgcccgtccccccacgagagtttgtaacacccgaagtcggggaggtaaccttttggagccagccgcctaaggtgggatagatgaatggggtgaagtcgtaacaaggtagccgtatcggaaggtgcgg

SEQ ID NO: 2474 - DNA, 1406 bp, Artificial Sequence
  Synthetic polymer
agagtttgattctggctcaggacgaacgctggcggcgtgcctaatacatgcaagtcgtacgcttctttttccaccggagcttgctccaccgggaaaagaggagtggcgaacgggtgagtaacacgtgggtaacctgcccatcagaaggggataacacttggaaacaggtgctaataccgtataacaatcgaaaccgcatggttttgatttgaaaggcgctttcgggtgtcactgatggatggacccgcggtgcattagctagttggtgaggtaacggctcaccaaggccacgatgcatagccgacctgagagggtgatcggccacattgggactgagacacggcccaaactcctacgggaggcagcagtagggaatcttcggcaatggacgaaagtctgaccgagcaacgccgcgtgagtgaagaaggttttcggatcgtaaaactctgttgttagaggagaataaggatgagagtaactgttcatcccttgacggtatctaaccagaaagccacggctaactacgtgccagcagccgcggtaatacgtaggtggcaagcgttgtccggatttattgggcgtaaagcgagcgcaggcggtttcttaagtctgatgtgaaagcccccggctcaaccggggagggtcattggaaactgggagacttgagtgcagaagaggagagtggaattccatgtgtagcggtgaaatgcgtagatatatggaggaacaccagtggcgaaggcggctctctggtctgtaactgacgctgaggctcgaaagcgtggggagcaaacaggattagataccctggtagtccacgccgtaaacgatgagagatgagtgttggagggttccgcccttcagtgctgcagctaacgcataagccactccgcctggggagtacggccgcaaggttgaaactcaaaggaattgacgggggcccgcacaagcggtggagcatgtggtttaattcgaagcaacgcgaagaaccttaccaggtcttgacatcctttgaccactctagagatagagcttccccttcgggggcaaagtgacaggtggtgcatggttgtcgtcagctcgtgtcgtgagatgttgggttaagtcccgcaacgagcgcaacccctattgttagttgccatcattcagttgggcactctagcaagactgccggtgacaaaccggaggaaggtggggatgacgtcaaatcatcatgccccctatgacctgggctacacacgtgctacaatgggaagtacaacgagttgcgaagtcgcgaggctaagctaatctcttaaagcttctctcagttcggattgcaggctgcaactcgcctgcacgaagccggaatcgctagtaatcgcggatcagcacgccgcggtgaataaaatcccgggccttgcaca

SEQ ID NO: 2475 - DNA, 1471 bp, Artificial Sequence
  Synthetic polymer
gcggcgtgcctaatacatgcaagtcgaacgcttctttcctccttagtgcttgcactcaattgaaaagaggagtgggggacgggtgagtaacacgtgggtaacctacccatcatagggggataacacttggaaacaggtgctaataccgcataacagtttatgccgcatggcataatagtgaaaggcgctttcgggtgtcgttgatggatggacccgcggtgcattatctagttggtgaggtaacggctcaccaaggacacgatgcatagccgacctgagagggtgatcggccacactggaactgagacacggacccactactcctacgggaggcagcagaatggaatcttcggcaatggacgaaagtctgaccgagcaacgccgcgtgagtgaataacgttttcggatcgtaaaactctgttgttagagaagaacaaggacgttagtaactgaacgtcccctgacggtatctaaccagaaagccacggctaactacgtgccagcagccgcggtaatacgtaggtggcaagcgttgtccggatttattgggcgtaaagcgagcgcaggcggtttcttaagtctgatgtgaaagcccccggctcaacgcagggagggacattggaaactggtagacttgaatgcagaagaggagagtggaattccatgtgtagcggtgaaatgcgtagatatatggaggaacaccagtggcgaaggcggctctctggtctgtaactgacgctgaggctcgaaagcgtggggagcaaacaggattagataccctggtagtccacgccgtaaacgatgagtgctaagtgttggagggtttacgcccttcagtgcggcagcaaacgcattaagcattccgcttggggagtacgtccgcaaggttgaaactcaaaggaattgacgggggcccgcacaagcggtggagcatgtggtttaattggaagcaacgcgaagacccttaccagttcttgacatcctttgaccactctagagatagagcttttccttcggggacaaagtgacaggtggtgcatggttgttgtcagctcgtgtcgtgagatgttgggttaagtcccgcaacgagcgcaacccttattgttagttgccatcatttagttgggcactctagcgagactgccggtgacaaaccggaggaaggtggggatgacgtcaaatcatcatgccccttatgacctgggctacacacgtgctacaatgggaagtacaaagagtagctagaccgcgaggtcatgcaaatctcttaaagcttctctcagttcggattgcagtctgcaactcgcctgcatgaagccggaatcgctagtaatcgcggatcagcacgccgcggtgaatacgttcccgggccttgtacacaccgcccgtcacaccacgagagtttgtaacacccgaagtcggtgaggtaacctttaaggagccagccgcctaaggtgggatagatgattgg

SEQ ID NO: 2476 - DNA, 1439 bp, Artificial Sequence; identical to SEQ ID NO: 1064
  Synthetic polymer

SEQ ID NO: 2477 - DNA, 1476 bp, Artificial Sequence
  Synthetic polymer
ggcggcgtgcctaatacatgcaagtcgaacgcttctttttccaccggagcttgctccaccggaaaaagaggagtggcgaacgggtgagtaacacgtggggaacctgcccatcggaaggggataacacttggaaacaggtgctaataccgtataacaatcaaaaccgcatggttttgatttgaaaggcgctttcggatgtcgctgatggatggacccgcggtgcattagctacttggcgaggtaacggctcaccaaggccacgatgcatagccgacctgacagggtgatcggccaccttgggactgacacacggcccaaactcctacgggaggcatcggtagggaatcttcggcaatggacgaaagtctgaccgagcaacgccgcgtgagtgaagaaggttttcggatcgtaaaactctgttgttagagaataacaaggatgatagtaactgttcatcccttgacagcatctaaccacaaagccacggctaactacgtgccaacaaccgcagtaatacgtaggtggcaagcgttgtccggatttattgagcgtagagcgagcgcaggcggtttcttaagtctgatgtgaaagccccccggctcaaccggggagggtcattggaaactgggagacttgagtgcagaagaggagagtggaattccatgtgtagcggtgaaatgcgtagatatatggaggaacaccagtggcgaaggcggctctctggtctgtaactgacgctgaggctcgaaagcgtggggagcaaacaggattagataccctggtagtccacgccgtaaacgatgagtgctaagtgttggagggtttccgcccttcagtgctgcagctaacgcattaagcactccgcctggggagtacgaccgcaaggttgaaactcaaaggaattgacgggggcccgcacaagcggtggagcatgtggtttaattcgaagcaacgcgaagaaccttaccaggtcttgacatcctttgaccactctagagatagagcttccccttcgggggcaaagtgacaggtggtgcatggttgtcgtcagctcgtgtcgtgagatgttgggttaagtcccgcaacgagcgcaacccttattgttagttgccatcattcagttgggcactctagcaagactgccggtgacaaaccggaggaaggtggggatgacgtcaaatcatcatgccccttatgacctgggctacacacgtgctacaatgggaagtacaacgagttgcgaagtcgcgaggctaagctaatctcttaaagcttctctcagttcggattgcaggctgcaactcgcctgcatgaagccggaatcgctagtaatcgcggatcagcacgccgcggtgaatacgttcccgggccttgtacacaccgcccgtcacaccacgagagtttgtaacacccgaagtcggtgaggtaacctttttggagccagccgcctaaggtgggatagatgattggggtgaa

SEQ ID NO: 2478 - DNA, 1461 bp, Artificial Sequence; identical to SEQ ID NO: 1014
  Synthetic polymer

SEQ ID NO: 2479 - DNA, 1550 bp, Artificial Sequence
  Synthetic polymer
agagtttgatcctggctcaggacgaacgctggcggcgtgcctaatacatgcaagtcgtacgcaacaatcacaccggagcttgctccaccgtggttgttgagtggcgaacgggtgagtaacacgtgggtaacctgcccatcagaaggggataacacttggaaacaggtgctaataccgtataataatttttctcgcatgagaagaatttgaaaggcgcttttgcgtcactgatggatggacccgcggtgtattagctagttggtgaggtaatggctcaccaaggcaacgatacatagccgacctgagagggtgatcggccacattgggactgagacacggcccaaactcctacgggaggcagcagtagggaatcttcggcaatggacgaaagtctgaccgagcaacgccgcgtgagtgaagaaggttttcggatcgtaaaactctgttggtaaagaagaacaagggtgagagtaaaacgttcaccccttgacggtatttacccagaaagccacggctaactacgtgccagcagccgcggtaatacgtaggtggcaagcgttgtccggatttattgggcgtaaagcgagcgcaggcggtcttctaagtctgatgtgaaagcccccggctcaaccggggagggtcattggaaactgggagacttgagtgcagaagaggagagtggaattccaagtgtagcggtgaaatgcgtagatatttggaggaacaccagtggcgaaggcgactctctggtctgtaactgacgctgaggctcgaaagcgtggggagcaaacaggattagataccctggtagtccacgccgtaaacgatgagtgctaagtgttggagggtttccgcccttcagtgctgcagctaacgcattaagcactccgcctggggagtacgaccgcaaggttgaaactcaaaggaattgacgggggcccgcacaagcggtggagcatgtggtttaattcgaagcaacgcgaagaaccttaccaggtcttgacatcccttgaaaatcctagagataggacttccccttcgggggcaaggtgacaggtggtgcatggttgtcgtcagctcgtgtcgtgagatgttgggttaagtcccgcaacgagcgcaacccctattgtcagttgccatcattaagttgggcactctggcgagactgccggtgacaaaccggaggaaggtggggatgacgtcaaatcatcatgccccttatgacctgggctacacacgtgctacaatgggaagtacaacgagtcgcgaagtcgcaaggctaagctaatctcttaaagcttctctcagttcggattgtgggctgcaactcgcccacatgaagccggaatcgctagtaatcgcggatcagcatgccgcggtgaatacgttcccgggccttgtacacaccgcccgtcacaccacgagagtttgtaacacccgaagccggtgaggtaacctttatggagccagccgtctaaggtgggatagatgattggggtgaagtcgtaacaaggtagccgtatcggaaggtgcggctggatcacctcctt

SEQ ID NO: 2480 - DNA, 1429 bp, Artificial Sequence
  Synthetic polymer
gagtggcaaaggggtgattaacacgtgggtaacctgcccatcagaaggggataacacttggaaacaggtgctaataccgtataacaatcgaaaccgcatggttttgatttgaaaggcgctttcgggtgtcgctgatggatggacccgcggtgcattagctatttggtgaggtaacggctcaccaaggccacgatgcatagccgacctgaaagggtgatcggccacattgggactgagacacggcccaaactcctacgggaggcagcagtagggaatcttcagcaatggacgaaagtctgaccgagcaacgccgcgtgagtgaaaaaggttttcggatcgtaaaactctgttgttatagaagaacaaggatgagagtaactgttcatcccttgacggtatctaaccagaaagccacggctaactacgtgccagcagccgcggtaatacgtaggtggcaagcgttgtccggatttattgggcgtgaagcgagcgcaggcggtttcttaagtctgatgtgaaagcccccggctcaaccggggagggtcattggaaactgggagacttgagtgcagaagaggagagtggaattccatgtgtatcggtgaaatgcgtatatatatggatgaacaccagtggcgaaggcggctctctggtctgtaactgacgctgaggctcgaaatcgtggggagcaaacaggattagatacccctggtagtccacgccgtaaacgatgagtgctaagtgttggagggtttccgcccttcagtgctgcagctaacgctttaagcactccgcctgcgggagtacgaccgcaaggttgaaactcaaaggaattgacgggggcccgcacaagcggtggagcatgtggtttaattcgaagcaacgcgaagaaccttaccaggtcttgacatcctttgaccattttagagatagagcttccccttcgggggcaaaatgacaggtggtgcatggttgtcgtcagctcgtgtcgtgagatgttgggttaagtcccgcaacgagcgcaacccttattgtcagttgccatcattcagttgggcactctggcaagactgccggtgacaaaccggaggaaggtggggatgacgtcaaatcatcatgccccttatgacctgggctacacacgtgctacaatgggaagtacaacgagttgcgaagtcgcgaggctaagctaatctcttaaagcttttctcagttcggattgcaggctgcaactcgcctgcatgaagtcggaatcgctagtaatcgcggatcagcacgccgcggtgaatacgttcccgggccttgtacacaccgcccgtcacaccatcgagagtttgtaacacccagaaagctcggtgagagtaacctttctgtggagtccagccgtcctaaggtgggaactagatgataggggtgaagtcgtaacaag

SEQ ID NO: 2481 - DNA, 1523 bp, Artificial Sequence; identical to SEQ ID NO: 4
  Synthetic polymer

SEQ ID NO: 2482 - DNA, 1490 bp, Artificial Sequence; identical to SEQ ID NO: 1067
  Synthetic polymer

SEQ ID NO: 2483 - DNA, 1480 bp, Artificial Sequence
  Synthetic polymer
gacgaacgctggcggcgtgcctaatacatgcaagtcgaacgcttctttcctcccgagtgcttgcactcaattggaaagaggagtggcggacgggtgagtaacacgtgggtaacctacccatcagagggggataacacttggaaacaggtgctaataccgcataacagtttatgccgcatggcataagagtgaaaggcgctttcgggtgtcgctgatggatggacccgcggtgcattagctagttggtgaggtaacggctcaccaaggccacgatgcatagccgacctgagagggtgatcggccacactgggactgagacacggcccagactcctacgggaggcagcagtagggaatcttcggcaatggacgaaagtctgaccgagcaacgccgcgtgagtgaagaaggttttcggatcgtaaaactctgttgttagagaagaacaaggacgttagtaactgaacgtcccctgacggtatctaaccagaaagccacggctaactacgtgccagcagccgcggtaatacgtaggtggcaagcgttgtccggctttattgggcgtaaagcgagcgctggcggtttcttaagtctgatgtgaaagcccccggctcaaccggggagggtcattggaaactgggagacttgagtgcagaagaggagagtggaattccatgtgtagcggtgaaatgcgtagatatatggaggaacaccagtggcgaaggcggctctctggtctgtaactgacgctgaggctcgaaagcgtggggagcaaacaggattagataccctggtagtccacgccgtaaacgatgagtgctaagtgttggagggtttccgcctttcagtgctgcagcaaacgcattaagcactccgcctggggagtacgaccgcagggtgaaactcaaaggaattgacgggggcccgccacaggcggtggagcatgtggtatatttagaagcacgagaagacctttcaccaggtctcgacatcttttgactactctagagatagagcttcccttcggggaacaaagtgacaggtgtgcatggtgttgtcagctcgtgtcgtgagatgttggttaaagtcgcgcaacgagcgcaccctttattgttagtgcccatcattaagttgggcactctagcgagactgcgggtgacaacccggaggaaggtggggatgacgtcaattcatcatgccccttatgacctgggctacacacgtgctacaatgggaagtacaacgagtcgctagaccgcgaggtcatgcaaatctcttaaagcttctctcagttcggattgcaggctgcaactcgcctgcatgaagccggaatcgctagtaatcgcggatcagcacgccgcggtgaatacgttcccgggccttgtacacaccgcccgtcacaccacgagagtttgtaacacccgaagtcggtgaggtaacctttttggagccagccgcctaaggtgggatagatgattggggt

SEQ ID NO: 2484 - DNA, 1477 bp, Artificial Sequence
  Synthetic polymer
cggcgtgcctaatacatgcaagtcgaacgcttctttcctcccgagtgcttgcactcaattggaaagaggagtggcggacgggtgagtaacacgtgggtaacctacccatcagagggggataacacttggaaacaggtgctaataccgcgtaacagtttatgccgcatggcataagagtgaaaggcgctttcgggtgtcgctgatggatggacccgcggtgcattagctagttggtgaggtaacggctcaccaaggccacgatgcatagccgacctgagagggtgatcggccacactgggactgagacacggcccagactcctacgggaggcagcagtagggaatcttcggcatggacgaaagtctgaccgagcaacgccgcgtgagtgaagaaggttttcggatcgtaaaactctgttgttagagaagaacaaggacgttagtaactgaacgtcccctgacggtatctaaccagaaagccacggctaactacgtgccagcagccgcggtaatacgtaggtggcaagcgttgtccggatttattgggcgtaaagcgagcgcaggcggtttcttaagtctgatgtgaaagcccccggctcaaccggggagggtcattggaaactgggagacttgagtgcagaagaggagagtggaattccatgtgtagcggtgaaatgcgtagatatatggaggaacaccagtggcgaaggcggctctctggtctgtaactgacgctgaggctcgaaagcgtggggagcaaacaggattagataccctggtagtccacgccgtaaacgatgagtgctaagtgttggaggggtttccgccccttcatgcctgcaccaacccctttaagcactccggcctgggggagtacgacccgcaaggttggaaactcaaaggaattgacggggggcccgcacaagcggtggagcatgtggtttaattcgaagcaacgcgaagaaccttaccaggtcttgacatcctttgaccactctagagatagagctttcccttcggggacaaagtgacaggtggtgcatggttgtcgtcagctcgtgtcgtgagatgttgggttaagtcccgcaacgagcgcaacccttattgttagttgccatcatttagttgggcactctagcgagactgccggtgacaaaccggaggaaggtggggatgacgtcaaatcatcatgccccttatgacctgggctacacacgtgctacaatgggaagtacaacgagtcgctagaccgcgaggtcatgcaaatctcttaaagcttctctcagttcggattgcaggctgcaactcgcctgcatgaagccggaatcgctagtaatcgcggatcagcacgccgcggtgaatacgttcccgggccttgtacacaccgcccgtcacaccacgagagtttgtaacacccgaagtcggtgaggtaacctttttggagaaaagccgcctaaggtgggatagatgattggggt

SEQ ID NO: 2485 - DNA, 1405 bp, Artificial Sequence
  Synthetic polymer
gagtttgatcctggctcaggacgaacgctggcggcgtgcctaatacatgcaagtcgaacgcataaatctcaccggagcttgctccaccgagatttgtgagtggcggacgggtgagtaacacgtgggtaacctgccctttaatgggggataacacttggaaacaggtgctaataccgcataacaatttttaacacatgttaaaaatttgaaagatggctttggctgtcgttaaaggatggacccgcggtgcattagctagttggtgaggtaacggctcaccaaggccatgatgcatagccgacctgagagggtgatcggccacactgggactgagacacggcccagactcctacgggaggcagcagtagggaatcttcggcaatggacgaaagtctgaccgagcaacgccgcgtgagtgaagaaggttttcggatcgtaaaactctgttgttagagaagaacaaggatgagagtaactgttcatcccttgacggtatctaaccagaaagccacggctaactacgtgccagcagccgcggtaatacgtaggtggcaagcgttgtccggatttattgggcgtaaagcgagcgcaggcggtttcttaagtctgatgtgaaagcccccggcttaaccggggagggtcattggaaactggggaacttgagtgcagaagaggagagtggattccatgtgtagcggtgaaatgcgtagatatatggaggaacaccagtggcgaaggcggctctctggtctgtaactgacgctgatgctcgaaagcgtggggagcaaacaggattagataccctggtagtccacgccgtaaacgatgagtgctaagtgttggagggtttccgcccttcagtgctgcagctaacgcattaagcactccgcctggggagtacgaccgcaaggttgaaactcaaaggaattgacgggggcccgcacaagcggtggagcatgtggtttaattcgacgcaacgcgaagaaccttaccaggtcttgacatcttttgaccattctagagatagaactttcccttcggggacaaaatgacaggtggtgcatggttgtcgtcagctcgtgtcgtgagatgttgggttaagtcccgcaacgagcgcaacccttattgttagttgccatcatttagttgggcactctagcaagactgccggtgacaaaccggaggaaggtggggatgacgtcaaatcatcatgccccttatgacctgggctacacacgtgctacaatgggaagtacaacgagtcgcaaagtcgcgaggctaagctaatctcttaaagcttctctcagttcggattgtaggctgcaactcgcctacatgaagccggaatcgctagtaatcgcggatcagcacgccgcggtgaatacgttcccgggcctgtacacac

SEQ ID NO: 2486 - DNA, 1477 bp, Artificial Sequence; identical to SEQ ID NO: 932
  Synthetic polymer

SEQ ID NO: 2487 - DNA, 1441 bp, Artificial Sequence; identical to SEQ ID NO: 921
  Synthetic polymer

SEQ ID NO: 2488 - DNA, 1383 bp, Artificial Sequence
  Synthetic polymer
gacgaacgctggcggcgtgcctaatacatgcaagtcgtacgcttctttttccaccggagcttgctccaccggaaaaagaggagtggcgaacgggtgagtaacacgtgggtaacctacccatcagaaggggataacacttggaaacaggtgctaataccgtataacaatcgaaaccgcatggttttgatttgaaaggcgctttcgggtgtcgctgatggatggacccgcggtgcattagctagttggtgaggtaacggctcaccaaggccacgatgcatagccgacctgagagggtgatcggccacattgggactgagacacggcccaaactcctacgggaggcagcagtagggaatcttcggcaatggacgaaagtctgaccgagcaacgccgcgtgagtgaagaaggttttcggatcgtaaaactctgttgttagagaagaacaaggatgagagtaactgttcatcccttgacggtatctaaccagaaagccacggctaactacgtgccagcagccgcggtaatacgtaggtggcaagcgttgtccggatttattgggcgtaaagcgagcgcaggcggtttcttaagtctgatgtgaaagcccccggctcaaccggggagggtcattggaaactgggagacttgagtgcagaagaggagagtggaattccatgtgtagcggtgaaatgcgtagatatatggaggaacaccagtggcgaaggcggctctctggtctgtaactgacgctgaggctcgaaagcgtggggagcaaacaggattagataccctggtagtccacgccgtaaacgaaggagtgctaaagtttgggggggtttccccccttcagtgttgcagctaacgccataaacattccgccgggggagtacgcccgcaaggttgaaactcaagggaattgacggggccccgcacaagcggtggagcatgtggtttaattgaaagcaacgcgaagaaccttaccaggtcttgacatccttgaccactctagagatagagctccccttccgggggcaaagtgacaggtggtgcatggtgttcgtcagctcgtgtcgtgagatgtggggtaagtccgccacgacgccacccttaattttagttgccctcattcagtgggcactcagccaagactgcggtgacaaacccggaggaaggtggggatgacgtcaaatcatcatgccccttatgacctgggctacacacgtgctacaatgggaagtacaacgagttgcgaagtcgcgaggctaagctaatctcttaaagcttctctcagttcggattgcaggctgcaactcgcctgcatgaagccggaatcgctagtaatcgcggatcagcacgccgcggtgaatacgttcccgggccttgcac

SEQ ID NO: 2489 - DNA, 1473 bp, Artificial Sequence; identical to SEQ ID NO: 1108
  Synthetic polymer

SEQ ID NO: 2490 - DNA, 1500 bp, Artificial Sequence
  Synthetic polymer
gtttgatcatggtcagtmcgaacgctgcggcgtgcttaatacatgcaagtcgyacgcttctttttccaccrgagcttgctccaccgcaaaaagaagagtggcgaacgggtaagtaacacgtgggtaccctgcccatcagaagggaataacacttggaaccaggtgctaaccsgtatawcaatcgaaccgcatggttttgatttgaaaggcgctttcgggtgtcgttgatgaatggaccccggtgcattagttagttggtaaggtacggctcaccaaggccacaatgcatacccgccttaaaagggtratsgcccmcattgggattaagacmcggcccaaaytcctacggaagccaccagtagggawtctycgccaatggacgaaagtttgcccaaccamcccggcgtaagtaaaaaaggttttcggattggtaaaactttgttgttagaaaagaccaaggatgagagtatctgttcatcccttgacggtatctaaccagaaagccacggctaactacgtgccagcagccgcggtaatacgtaggtggcaagcgttgtccggatttattgggcgtaaagcgagcgcaggcggtttcttaagtctgatgtgaaagcccccggctcaaccggggagggtcattggaaactgggagacttgagtgcagaagaggagagtggaattccatgtgtagcggtgaaatgcgtagatatatggaggaacaccagtggcgaaggcggctctctggtctgtaactgacgctgaggctcgaaagcgtggggagcaaacaggattagataccctggtagtccacgccgtaaacgatgagtgctaagtgttggagggtttccgcccttcagtgctgcagctaacgcattaagcactccgcctggggagtacgaccgcaaggttgaaactcaaaggaattgacgggggcccgcacaagcggtggagcatgtggtttaattcgaagcaacgcgaagaaccttaccaggtcttgacatcctttgaccactctagagatagagcttccccttcgggggcaaagtgacaggtggtgcatggttgtcgtcagctcgtgtcgtgagatgttgggttaagtcccgcaacgagcgcaacccttattgttagttgccatcattcagttgggcactctaacaagactgccggtgacaaaccggaggaaggtggggatgacgtcaaatcatcatgccccttatgacctgggctacacacgtgctacaatgggaagtacaacgagttgcgaagtcgcgaggctaagctaatctcttaaagcttctctcagttcggattgcaggctgcaactcgcctgcatgaagccggaatcgctagtaatcgcggatcaacacgccgcggtgaatacgttcccgggccttgtacacaccgccgtcacaccacgagagtttgtaacacccgaagtcggtgaggtaaccttttttggagccagccgcctaaagtggggatagatgattggggtgaagt

SEQ ID NO: 2491 - DNA, 1556 bp, Artificial Sequence
  Synthetic polymer
agagtttgatcctggctcaggacgaacgctggcggcgtgcctaatacatgcaagtcgaacgcttctttttccaccgagcttgctccaccggaaaaagaagagtggcgaacgggtgagtaacacgtgggtaacctaccttcaagcgggggataacatttggaaacaggtgctaataccgcataatattaatgaactcatgtttattaattgaaaggcgcttttgcgtcacttgaggatggacccgcggtgcattagctagttggtgaggtaaacggctcaccaaggccacgatgcatagccgacctgagagggtgatcggccacactgggactgagacacggcccagactcctacgggaggcagcagtagggaatcttcggcaatggacgaaagtctgaccgagcaacgccgcgtgagtgaagaaggttttcggatcgtaaaactctgttgttagagaagaacaaggatgagagtaaaatgttcatcccttgacggtatctaaccagaaagccacggctaactacgtgccagcagccgcggtaatacgtaggtggcaagcgttgtccggatttattgggcgtaaagcgagcgcaggcggtttcttaagtctgatgtgaaaggccccggctcaaccggggagggtcattggaaactgggagacttgagtgcagaagaggagagtggaattccatgtgtagcggtgaaatgcgtagatatatggaggaacaccagtggcgaaggcggctctctggtctgtaactgacgctgaggctcgaaagcgtggggagcaaacaggattagataccctggtagtccacgccgtaaacgatgagtgctaagtgttggagggtttccgcccttcagtgctgcagcaaacgcattaagcactccgcctggggagtacgaccgcaaggttgaaactcaaaggaattgacgggggcccgcacaagcggtggagcatgtggtttaattcgaagcaacacgaagaaccttaccaggtcttgacatcctttgaccactctagagatagagcttccccttcgggggcaaagtgacaggtggtgcatgggtgccggtcagctcgtgtcgtgagatgttgggttaagtcccgcaacgagcgcaacccttattgttagttgccatcatttagttgggcactctagcgagactgccggtgacaaaccggaggaaggtggggatgacgtcaaatcatcatgccccttatgacctgggctacacacgtgctacaatgggaagtacaacgagttgcgaagtcgcgaggctaagctaatctcttaaagcttctctcagttcggattgtaggctgcaactcgcctacatgaagccggaatcgctagtaatcgcggatcagcacgccgcggtgaatacgttcccgggccttgtacacaccgcccgtcacaccacgagagtttgtaacacccgaagtcggtgaggtaacctttttggagccagccgcctaaggtgggatagatgattggggtgaagtcgtaacaaggtagccgtatcggaaggtgcggctggatcacctcctttct

SEQ ID NO: 2492 - DNA, 1387 bp, Artificial Sequence; identical to SEQ ID NO: 875
  Synthetic polymer

SEQ ID NO: 2493 - DNA, 1354 bp, Artificial Sequence; identical to SEQ ID NO: 725
  Synthetic polymer

SEQ ID NO: 2494 - DNA, 1369 bp, Artificial Sequence; identical to SEQ ID NO: 799
  Synthetic polymer

SEQ ID NO: 2495 - DNA, 1391 bp, Artificial Sequence; identical to SEQ ID NO: 369
  Synthetic polymer

SEQ ID NO: 2496 - DNA, 1353 bp, Artificial Sequence; identical to SEQ ID NO: 646
  Synthetic polymer

SEQ ID NO: 2497 - DNA, 1356 bp, Artificial Sequence; identical to SEQ ID NO: 664
  Synthetic polymer

SEQ ID NO: 2498 - DNA, 1494 bp, Artificial Sequence; identical to SEQ ID NO: 487
  Synthetic polymer

SEQ ID NO: 2499 - DNA, 1363 bp, Artificial Sequence
  Synthetic polymer
gatgaacgctggcggcgtgcttaacacatgcaaatcgaacgaaagcatttaagacggtatttctttcgggaagaagacttttatgtactgagtggcggtacgggttgagtaacgcgtgggtaacctgcctcacacagggggtatagcagtttggaaacggctgataataccgcataagcgcacagtaccgcatggtacagtgtgaaaaactccggtggtgtgagatggacccgcgtctgattagcttgttggcagggtaacggcctaccaaggcaacgatcagtagccgacctgagagggtgaccggccacattgggactgagacacggcccagactcctacgggaggcagcagtggggaatattgcacaatggaggaaactctgatgcagcgacgccgcgtgagtgaagaagtaattcgttatgtaaagctctatcagcagggaagatagtgacggtacctgactaagaagctccggctaaatacgtgccagcagccgcggtaatacgtatggagcaagcgttatccggatttactgggtgtaaagggagtgtaggtggcatcacaagtcagaagtgaaagcccggggctcaaccccgggactgcttttgaaactgtggagctggagtgcaggagaggcaagtggaattcctagtgtagcggtgaaatgcgtagatattaggaggaacaccagtggcgaaggcggcttgctggactgtaactgacactgaggctcgaaagcgtggggagcaaacaggattagataccctggtagtccacgccgtaaacgatgaatactaggtgtcggggctcataagagcttcggtgccgcagcaaacgcaataagtattccacctggggagtacgttcgcaagaatgaaactcaaaggaattgacggggacccgcacaagcggtggagcatgtggtttaattcgaagcaacgcgaagaaccttaccaagtcttgacatcctcttgcccggtcagtaatgtgaccttttcttcggaacaagagtgacaggtggtgcatggttgtcgtcagctcgtgtcgtgagatgttgggttaagtcccgcaacgagcgcaacccctattcttagtagccagcatataaggtgggcactctaggaagactgccagggataacctggaggaaggtggggatgacgtcaaatcatcatgccccttatgacttgggctacacacgtgctacaatggcgtaaacaaagtgaagcgagagtgtgagcttaagcaaatcacaaaaataacgtctcagttcggattgtagtctgcaactcgactacatgaagctggaatcgctagtaatcgcgaatcagaatgtcgcggtgaatacgttcccgggtct

SEQ ID NO: 2500 - DNA, 1392 bp, Artificial Sequence; identical to SEQ ID NO: 440
  Synthetic polymer

SEQ ID NO: 2501 - DNA, 1339 bp, Artificial Sequence; identical to SEQ ID NO: 672
  Synthetic polymer

SEQ ID NO: 2502 - DNA, 1389 bp, Artificial Sequence
  Synthetic polymer
agagtttgatcctggctcaggatgaacgctggcggcgtgcttaacacatgcaagtcgaacgaagcatttgcgacagattttttcggaatgaagttgcttatgactgagtggcggacgggtgagtaacgcgtgggtaacctgccttgtactgggggatagcagctggaaacggctggtaataccgcataagcgcacaatgttgcatgacatggtgtgaaaaactccggtggtataagatggacccgcgtctgattagctagttggtgagataacagcccaccaaggcgacgatcagtagccgacctgagagggtgaccggccacattgggactgagacacggcccagactcctacgggaggcagcagtggggaatattgcacaatggaggaaactctgatgcagcgacgccgcgtgagtgaagaagtaattcgttatgtaaagctctatcagcagggaagatagtgacggtacctgactaagaagctccggctaaatacgtgccagcagccgcggtaatacgtatggagcaagcgttatccggatttactgggtgtaaagggagtgtaggtggccatgcaagtcagaagtgaaaatccggggctcaaccccggaactgcttttgaaactgtaaggctggagtgcaggaggggtgagtggaattcctagtgtagcggtgaaatgcgtagatattaggaggaacaccagtggcgaaggcggctcactggactgtaactgacactgaggctcgaaagcgtggggagcaaacaggattagataccctggtagtccacgccgtaaacgatgattactaggtgtggggggtctgaccccttccgtgccggagttaacacaataagtaatccacctggggagtacggccgcaaggttgaaactcaaaggaattgacgggggcccgcacaagcagtggagtatgtggtttaattcgaagcaacgcgaagaaccttaccaggtcttgacatccaactaacgaagtagagatacattaggtgcccttcggggaaagttgagacaggtggtgcatggttgtcgtcagctcgtgtcgtgagatgttgggttaagtcccgcaacgagcgcaacccttgctattagttgctacgcaagagcactctaataggactgccgttgacaaaacggaggaaggtggggacgacgtcaaatcatcatgccccttatgacctgggctacacacgtactacaatggatgttaacagagggaggcaagacagtgatgtggagcaaacccctaaaaacattctcagttcagattgcaggctgcaacccgcctgcatgaagatggaattgctagtaatcgcagatcagcatgctgcggtgaatacgttcccgggtcttgcactcaccgcccgtca

SEQ ID NO: 2503 - DNA, 1345 bp, Artificial Sequence; identical to SEQ ID NO: 626
  Synthetic polymer

SEQ ID NO: 2504 - DNA, 1359 bp, Artificial Sequence; identical to SEQ ID NO: 793
  Synthetic polymer

SEQ ID NO: 2505 - DNA, 1394 bp, Artificial Sequence; identical to SEQ ID NO: 620
  Synthetic polymer

SEQ ID NO: 2506 - DNA, 1356 bp, Artificial Sequence; identical to SEQ ID NO: 692
  Synthetic polymer

SEQ ID NO: 2507 - DNA, 1446 bp, Artificial Sequence; identical to SEQ ID NO: 986
  Synthetic polymer

SEQ ID NO: 2508 - DNA, 1454 bp, Artificial Sequence; identical to SEQ ID NO: 994
  Synthetic polymer

SEQ ID NO: 2509 - DNA, 1453 bp, Artificial Sequence; identical to SEQ ID NO: 21
  Synthetic polymer

SEQ ID NO: 2510 - DNA, 1356 bp, Artificial Sequence; identical to SEQ ID NO: 717
  Synthetic polymer

SEQ ID NO: 2511 - DNA, 1438 bp, Artificial Sequence; identical to SEQ ID NO: 926
  Synthetic polymer

SEQ ID NO: 2512 - DNA, 1392 bp, Artificial Sequence; identical to SEQ ID NO: 221
  Synthetic polymer

SEQ ID NO: 2513 - DNA, 1447 bp, Artificial Sequence; identical to SEQ ID NO: 1002
  Synthetic polymer

SEQ ID NO: 2514 - DNA, 1355 bp, Artificial Sequence; identical to SEQ ID NO: 729
  Synthetic polymer

SEQ ID NO: 2515 - DNA, 1460 bp, Artificial Sequence; identical to SEQ ID NO: 907
  Synthetic polymer

SEQ ID NO: 2516 - DNA, 1394 bp, Artificial Sequence; identical to SEQ ID NO: 428
  Synthetic polymer

SEQ ID NO: 2517 - DNA, 1353 bp, Artificial Sequence; identical to SEQ ID NO: 638
  Synthetic polymer

SEQ ID NO: 2518 - DNA, 1354 bp, Artificial Sequence; identical to SEQ ID NO: 740
  Synthetic polymer

SEQ ID NO: 2519 - DNA, 1389 bp, Artificial Sequence; identical to SEQ ID NO: 445
  Synthetic polymer

SEQ ID NO: 2520 - DNA, 1392 bp, Artificial Sequence; identical to SEQ ID NO: 338
  Synthetic polymer

SEQ ID NO: 2521 - DNA, 1385 bp, Artificial Sequence; identical to SEQ ID NO: 393
  Synthetic polymer

SEQ ID NO: 2522 - DNA, 1497 bp, Artificial Sequence; identical to SEQ ID NO: 484
  Synthetic polymer

SEQ ID NO: 2523 - DNA, 1450 bp, Artificial Sequence; identical to SEQ ID NO: 948
  Synthetic polymer

SEQ ID NO: 2524 - DNA, 1393 bp, Artificial Sequence; identical to SEQ ID NO: 250
  Synthetic polymer

SEQ ID NO: 2525 - DNA, 1391 bp, Artificial Sequence; identical to SEQ ID NO: 150
  Synthetic polymer

SEQ ID NO: 2526 - DNA, 1389 bp, Artificial Sequence
  Synthetic polymer
agagtttgatcctggctcaggatgaacgctggcggcgtgcttaacacatgcaagtcgaacgaagcaccatattagattttcttcgggaatgaagatatggtgactgagtggcggacgggtgagtaacgcgtgggtaacctgcctcatacagggggatagcagttggaaacgactggtaataccgcataagcgcacggtatcgcatgatacagtgtgaaaaactccggtggtatgagatggacccgcgtctgattagctagttggtaaggtaacggcttaccaaggcgacgatcagtagccgacctgagagggtgaccggccacattgggactgagacacggcccagactcctacgggaggcagcagtggggaatattgcacaatggaggaaactctgatgcagcgacgccgcgtgagtgaagaagttattcgtaatgtaaagctctatcagcagggaagatagtgacggtacctgactaagaagctccggctaaatacgtgccagcagccgcggtaatacgtatggagcaagcgttatccggatttactgggtgtaaagggagtgtaggtggctgtgcaagtcagaagtgaaagcccggggctcaaccccgggactgcttttgaaactgtatagctagagtgcaggaggggcaagtggaattcctagtgtagcggtgaaatgcgtagatattaggaggaacaccagtggcgaaggcggcttgctggactgtaactgacactgaggctcgaaagcgtggggagcaaacaggattagataccctggtagtccacgccgtaaacgatgaatactaggtgtcggggctcgtatagagcttcggtgccgcagcaaacgcaataagtattccacctggggagtacgttcgcaagaatgaaactcaaaggaattgacggggacccgcacaagcggtggagcatgtggtttaattcgaagcaacgcgaagaaccttaccaagtcttgacatcccactgacagttctttaatcggaacctttcttcggaacagtggagacaggtggtgcatggttgtcgtcagctcgtgtcgtgagatgttgggttaagtcccgcaacgagcgcaacccttatccttagtagccagcagtaagatgggcactctagggagactgccagggataacctggaggaaggtggggatgacgtcaaatcatcatgccccttatgacttgggctacacacgtgctacaatggcgtaaacaaagtgaagcgagagtgtgagcttaagcaaatcacaaaaataacgtctcagttcggattgtagtctgcaactcgactacatgaagctggaatcgctagtaatcgcagatcagaatgctgcggtgaataagttcccgggtcttgcacacaccgccc

SEQ ID NO: 2527 - DNA, 1378 bp, Artificial Sequence; identical to SEQ ID NO: 895
  Synthetic polymer

SEQ ID NO: 2528 - DNA, 1498 bp, Artificial Sequence
  Synthetic polymer
agagtttgattatggctcaggatgaacgctggcggcgtgcttaacacatgcaagtcgaacgaagcactttatttgattttcttcgggaatgattatttagtgactgagtggcggacgggtgagtaacgcgtgggtaacctgcctcatacagggggatagcagttggaaacgactggtaataccgcataagcgcacaggaccgcatggtcgggtgtgaaaaactccggtggtatgagatggacccgcgtctgattagctagttggtggggtaacggctcaccaaggcgacgatcagtagccggcctgagagggtgaacggccacattgggactgagacacggcccagactcctacgggaggcagcagtggggaatattgcacaatggaggaaactctgatgcagcgacgccgcgtgagtgaagaagtaattcgttatgtaaagctctatcagcagggaagatagtgacggtacctgactaagaagctccggctaaatacgtgccagcagccgcgktaatacgtatggagcaagcgttatccggatttactgggtgtaaagggagtgtaggtggcsatacaagtcagaagtgaaagcccggggctcaaccccgggactgcttttgaaactgtaaggcttgagtgcaggaggggtgagtggaattcctagtgtagcggtgaaatgcgtagatattaggaggaacaccagtggcgaaggcggctcaccggactgtaactgacactgaggctcgaaagcgtggggagcaaacaggattagataccctggtagtccacgccgtaaacgatgaatactaggtgtcggggcccataagggcttcggtgccgcagcaaacgcaataagtattccacctgggggagtacgttcgcaagaatgaaactcaaaggaattgacgggggacccgcacaagcggtgggagcatgtgggtttaattcgaagcaacgcgaagaaccttaccaagtcttgacatcctcttgaccggtcagtaatgtggsctttccttcggacaagagagacaggtggtgcatggttgtcgtcagctcgtgtcgtgagatgttgggttaagtcccgcaacgagcgcaacccttatccttagtagccagcagtaagatgggcactctagggagactgccagggataacctggaggaaggtggggatgacgtcaaatcatcatgccccttatgacttgggctacacacgtgctacaatggcgtaaacagagtgaagcgaagtcgtgaggccgagcaaatcacaaaaataacgtctcagttcggattgtagtctgcaactcgactacatgaagctggaatcgctagtaatcgcagatcagaatgctgcggtgaatacgttcccgggtcttgtacacaccgcccgtcacaccatgggagtcgaaaatgcccgaagtcggtgacctaacgcaagaaggagccgccgaaggcaggtttgataactggggtgaagtcgtaacaaggtaaccgta

SEQ ID NO: 2529 - DNA, 1394 bp, Artificial Sequence; identical to SEQ ID NO: 432
  Synthetic polymer

SEQ ID NO: 2530 - DNA, 1463 bp, Artificial Sequence; identical to SEQ ID NO: 1086
  Synthetic polymer

SEQ ID NO: 2531 - DNA, 1384 bp, Artificial Sequence; identical to SEQ ID NO: 658
  Synthetic polymer

SEQ ID NO: 2532 - DNA, 1449 bp, Artificial Sequence; identical to SEQ ID NO: 1114
  Synthetic polymer
  misc_feature (724)..(724): n is a, c, g, or t

SEQ ID NO: 2533 - DNA, 1385 bp, Artificial Sequence; identical to SEQ ID NO: 394
  Synthetic polymer

SEQ ID NO: 2534 - DNA, 1497 bp, Artificial Sequence; identical to SEQ ID NO: 474
  Synthetic polymer

SEQ ID NO: 2535 - DNA, 1392 bp, Artificial Sequence; identical to SEQ ID NO: 226
  Synthetic polymer

SEQ ID NO: 2536 - DNA, 1353 bp, Artificial Sequence; identical to SEQ ID NO: 633
  Synthetic polymer

SEQ ID NO: 2537 - DNA, 1364 bp, Artificial Sequence; identical to SEQ ID NO: 655
  Synthetic polymer

SEQ ID NO: 2538 - DNA, 1394 bp, Artificial Sequence; identical to SEQ ID NO: 734
  Synthetic polymer

SEQ ID NO: 2539 - DNA, 1393 bp, Artificial Sequence; identical to SEQ ID NO: 458
  Synthetic polymer

SEQ ID NO: 2540 - DNA, 1437 bp, Artificial Sequence
  Synthetic polymer
cgtgcttaacacatgcaagtcgaacgaagcactttgattgatttcttcggattgaaattttagtgactgagtggcggacgggtgagtaacgcgtgggtaacctgcctcacacagggggataacagttggaaacggctgctaataccgcataagcgcacagtaccgcatggtacagtgtgaaaaactccggtggtgtgagatggacccgcgtctgattagctagttggcagggcaacggcctaccaaggcgacgatcagtagccgacctgagagggtgaccggccacattgggactgagacacggcccagactcctacgggaggcagcagtggggaatattgcacaatggaggaaactctgatgcagcgacgccgcgtgagtgaagaagtaattcgttatgtaaagctctatcagcagggaagatagtgacggtacctgactaagaagctccggctaaatacgtgccagcagccgcggtaatacgtatggagcaagcgttatccggatttactgggtgtaaagggagtgtaggtggcgtcacaagtcagaagtgaaagcccggggctcaaccccgggactgcttttgaaactgtggagctggagtgcaggagaggcaagtggaattcctagtgtagcggtgaaatgcgtagatattaggaggaacaccagtggcgaaggcggcttgctggactgtaactgacactgaggctcgaaagcgtggggagcaaacaggattagataccctggtagtccacgccgtaaacgatgaatactaggtgtcggggctcataagagcttcggtgccgcagcaaacgcaataagtattccacctggggagtacgttcgcaagaatgaaactcaaaggaattgacggggacccgcacaagcggtggagcatgtggtttaattcgaagcaacgcgaagaaccttaccaagtcttgacatccttttgcccggtcagtaatgtgaccttttcttcggaacaagagtgacaggtggtgcatggttgtcgtcagctcgtgtcgtgagatgttgggttaagtcccgcaacgagcgcaacccctattcttagtagccagcatataaggtgggcactctaggaagactgccagggataacctggaggaaggtggggatgacgtcaaatcatcatgccccttatgacttgggctacacacgtgctacaatggcgtaaacaaagtgaagcgagagtgtgagcttaagcaaatcacaaaaataacgtctcagttcggattgtagtctgcaactcgactacatgaagctggaatcgctagtaatcgcgaatcagaatgtcgcggtgaatacgttcccgggtcttgtacacaccgcccgtcacaccatgggagtcggaaatgcccgaagtcggtgacctaacgaaagaaggagccgccgaaggcaggtctgataactggggtg

SEQ ID NO: 2541 - DNA, 1392 bp, Artificial Sequence; identical to SEQ ID NO: 400
  Synthetic polymer

SEQ ID NO: 2542 - DNA, 1492 bp, Artificial Sequence; identical to SEQ ID NO: 24
  Synthetic polymer

SEQ ID NO: 2543 - DNA, 1396 bp, Artificial Sequence; identical to SEQ ID NO: 679
  Synthetic polymer

SEQ ID NO: 2544 - DNA, 1347 bp, Artificial Sequence; identical to SEQ ID NO: 106
  Synthetic polymer

SEQ ID NO: 2545 - DNA, 1436 bp, Artificial Sequence; identical to SEQ ID NO: 1113
  Synthetic polymer

SEQ ID NO: 2546 - DNA, 1394 bp, Artificial Sequence; identical to SEQ ID NO: 405
  Synthetic polymer

SEQ ID NO: 2547 - DNA, 1367 bp, Artificial Sequence; identical to SEQ ID NO: 741
  Synthetic polymer

SEQ ID NO: 2548 - DNA, 1391 bp, Artificial Sequence; identical to SEQ ID NO: 430
  Synthetic polymer

SEQ ID NO: 2549 - DNA, 1392 bp, Artificial Sequence; identical to SEQ ID NO: 152
  Synthetic polymer

SEQ ID NO: 2550 - DNA, 1363 bp, Artificial Sequence; identical to SEQ ID NO: 151
  Synthetic polymer

SEQ ID NO: 2551 - DNA, 1393 bp, Artificial Sequence; identical to SEQ ID NO: 616
  Synthetic polymer

SEQ ID NO: 2552 - DNA, 1390 bp, Artificial Sequence; identical to SEQ ID NO: 380
  Synthetic polymer

SEQ ID NO: 2553 - DNA, 1437 bp, Artificial Sequence; identical to SEQ ID NO: 1003
  Synthetic polymer

SEQ ID NO: 2554 - DNA, 1435 bp, Artificial Sequence; identical to SEQ ID NO: 973
  Synthetic polymer

SEQ ID NO: 2555 - DNA, 1393 bp, Artificial Sequence; identical to SEQ ID NO: 426
  Synthetic polymer

SEQ ID NO: 2556 - DNA, 1449 bp, Artificial Sequence; identical to SEQ ID NO: 1041
  Synthetic polymer

SEQ ID NO: 2557 - DNA, 1365 bp, Artificial Sequence; identical to SEQ ID NO: 615
  Synthetic polymer

SEQ ID NO: 2558 - DNA, 1413 bp, Artificial Sequence
  Synthetic polymer
ggatgaacgctggcggcgcgcctaacacatgcaagtcgaacggcacccctcctcggagggaagcgagtggcgaacggctgagtaacacgtggagaacccgccccctcctccgggatagcctcgggaaaccgtgggtaataccggatgaccccgcagggccgcatggccccgcgggcaaagcccagacgggaggggatggctccgcggcccatcaggtagacggcggggtgacggcccaccgtgccgacgacgggtagccgggttgagagaccgaccggccagattgggactgagacacggcccagactcctacgggaggcagcagtggggaatcttgcgcaatggggggaaccctgacgcagcgacgccgcgtgcgggacgaaggccctcgggtcgtaaaccgctttcagcagggatgagacaagacggtacctgcagaagaagccccggctaactacgtgccagcagccgcggtaatacgtagggggcgagcgttatccggattcattgggcgtaaagcgcgcgtaggcggcccggcaggcagggggtcaaatggcggggctcaaccccgtcccgccccctgaaccgccgggctcgggtccggtaggggagggtggaacacccggtgtagcggtggaatgtgcagatatcgggtggaacaccggtggcgaaggcggccctctgggccgagaccgacgctgaggcgcgaaagctgggggagcgaacaggattagataccctggtagtcccagccgtaaacgatggacgctaggtgtgagggggcgatccttccgtgccgcagccaacgcattaagcgtcccgcctggggagtacggcggcaaggctaaaactcaaaggaattgacgggggcccgcacaagcagcggagcatgtggcttaattcgaagcaacgcgaagaaccttaccagggcttgacatgaccgtgaagccggggagacccggtggccgagaggagcggtcacaggtggtgcatggctgtcgtcagctcgtgtcgtgagatgtttggttaagtccagcaacgagcgcaacccccgccgcatgttgccagcacctcgggtgggcacccatgcgggaccgccggagtcaatccggaggagggcggggacgacgtcaagtcatcatgccccttatgccctgggctgcacacgtgctacaatggccggtacagcgggatgcgatggcgcgagccggagcggatccttgaaagccggccccagttcggattgggggctgcaacccgcccccatgaagtcggagttgctagtaatcgcggatcagcatgccgcggtgaatgcgttcccgggctttgtacactccgcccgtcacaccacccgagtcgtctgcacccgaagtcgccggcccaacctcaaggggggaggctctgaaggtgtgg

SEQ ID NO: 2559 - DNA, 1460 bp, Artificial Sequence
  Synthetic polymer
gatgaacgctggcggcgtgcttaacacatgcaagtcgaacgagaaagcgcccccgggcgcgagtagagtggcgaacgggtgagtagcacgtgaggaacctgcccccctccccgggataacccagggaaacctgcgctaataccggatgccccgggccggtcgcatggccggcccgggaaagcccaggcggagggggatggcctcgcggcccattaggcagtcggcggggtaacggcccaccgagccggcgatgggtagccgggttgagagaccgaccggccacattgggactgagacacggcccagactcctacgggaggcagcagtggggaattttgcgcaatgggggaaaccctgacgcagcaacgccgcgtgcgggacgaaggccctcgggttgtaaaccgctttcagcaggggagaaactgacggtacctgcagaagaagctccggctaactacgtgccagcagccgcggtaatacgtagggagcgagcgttatccggattcattgggcgtaaagcgcgcgtaggcggccggctaagtcgggagtcaaagcccggggctcaaccccggcccgctcccgaaactggccggcttgagtctggcaggggaaggcggaattcccagtgtagcggtgaaatgcgcagatattgggaagaacaccggtggcgaaggcggccttctgggccacgactgacgctgaggcgcgaaagctgggggagcgaacaggattagataccctggtagtcccagccgtaaacgatgatcactaggtgtggggggctctcgccctccgtgccgaagccaacgcattaagtgatccgcctggggagtacggccgcaaggctaaaactcaaaggaattgacggggacccgcacaagcagcggagcatgtggcttaattcgaagcaacgcgaagaaccttacctggccttgacatgcaggtgaagcggcggaaacgccgtggccggaaggagcctgcgcaggtggtgcatggctgtcgtcagctcgtgtcgtgagatgttaggttaagtcctgcaacgagcgcaacccccgtcgcatgttgccagcatccagttggggactcatgcgagactgccggcgtcaagccggaggaaggtggggacgacgtcaagtcatcatgccccttatggccggggccgcacacgtgctacattggccggtacagagggctgcgaacccgcgagggcgagcgaatcccggaaagccggccccagttcggatcgcaggctgcaacccgcctgcgtgaagccggagttgctagtaatcgcggatcagcacgccgcggtgaatacgttcccgggtcttgtacacaccgcccgtcacaccacccgagtcgtctgcacccgaagtcgccggcccaacccgcgagggggggaggcgccgaaggtgtggagggtgaggggggtgaagtcgtaacaaggtagccgtaccggaagg

SEQ ID NO: 2560 - DNA, 1509 bp, Artificial Sequence
  Synthetic polymer
ggagagtttgatcctggctcaggatgaacgctggcggcgcgcctaacacatgcaagtcgaacggttaaggccccctttagggggcgcatagagtggcgaacgggtgagtaacacgtgaccaacccgcccccccaccgggacaacctcgggaaaccgaggctaataccggatacgccggggcccccgcatgggggccccgggaaagccttggcgggaggggacggggtcgcggcccatcaggtagacggcggggcgaaggcccgccgtgccgacgacgggtagccgggctgagaggccgatcggccacattgggactgagacacggcccagactcctacgggaggcagcagtggggaatattgcgcaatggggggaaccctgacgcagcgacgccgcgtgcgggaaggaggccttcgggtcgtaaaccgctttcagcagggaagaagcctgacggtacctgcagaagaagccccggctaactacgtgccagcagccgcggtaatacgtagggggcgagcgttatccggattcattgggcgtaaagcgcgcgcaggcggcccgccaagcggcctcgtcgaagccgggggctcaacccccggaagcgacccgaactggcgggctcgagtggggcaggggaggatggaattcccggtgtagcggtgaaatgcgcagatatcgggaggaacaccgacggcgaaggcagccctctgggccttcactgacgctgaggcgcgaaagctgggggagcgaacaggattagataccctggtagtcccagccgtaaacgatgggcgctaggtgcggggggacacgaccctccgtgccgcagccaacgcattaagcgccccgcctggggagtacggccgcaaggctaaaactcaaaggaattgacgggggcccgcacaagcagcggagcatgtggcttaattcgaagcaacgcgaagaaccttaccagggcttgacatgcgggtgaagcggcggagacgccgtggccggaaggagcccgcgcaggtggtgcatggctgtcgtcagctcgtgtcgtgagatgttgggttaagtcccgcaacgagcgcaacccccgccgcatgttgccagcattcagttgggcactcatgcgggaccgccggcgccaagccggaggaaggcggggacgacgtcaagtcatcatgccccccatgccctgggccgcacacgtgctacaatggccggcacagcgggcagcggacccgcgagggcgagcgaatcccttaaagccggccccagttcggatcggaggctgcaacccgcctccgtgaagccggagttgctagtaatcgcggatcagcacgccgcggtgaatgcgttcccgggccttgtacacaccgcccgtcacaccacccgagtcgtctgcacccgaagccgccggcccaacccgcaagggggggaggcgtcgaaggtgtggagggtgaggggggtgaagtcgtaacaaggtagccgtaccggaaggtgcggctggatcacctcctttct

SEQ ID NO: 2561 - DNA, 1327 bp, Artificial Sequence
  Synthetic polymer
gatgaacgctggcggcgtgcttaacacatgcaagtcgaacgattaagacggcttcggccgtgtatagagtggcgaacgggtgagtaacacgtgaccaacctgccccgcgctccgggataaccattggaaacgatggctaataccggatactccgggcgccccgcatggggcggccgggaaagccccgacggcgcgggatggggtcgcggcccattaggtagtaggcggggtaacggcccacctagcccgcgatgggtagccggactgagaggtcgaccggccacattgggactgagatacggcccagactcctacgggaggcagcagtggggaattttgcgcaatgggcgaaagcctgacgcagcaacgccgcgtgcgggacgaaggccttcgggttgtaaaccgctttcagcagggaagataacgacggtacctgcagaagaagctccggctaactacgtgccagcagccgcggtaatacgtagggggcgagcgttatccggattcattgggcgtaaagcgcgcgtaggcggccgcctaagcggaacctctaatcccggggctcaacctcgggccgggttccggactgggcggctcgagtgcggtagaggcagttggaattcccggtgtagcggtggaatgcgcagatatcgggaagaacaccgatggcgaaggcagactgctgggccgccactgacgctgaggcgcgaaagctgggggagcgaacaggattagataccctggtagtcccagccgtaaacgatggacgctaggtgtggggggacagtccctccgtgccgcagccaacgcattaagcgtcccgcctggggagtacggccgcaaggctaaaactcaaaggaattgacgggggcccgcacaagcagcggagcatgtggcttaattcgaagcaacgcgaagaaccttaccagggcttgacatgctagtgaagccggggaaacccggtggccgagaggagctagtgcaggtggtgcatggctgtcgtcagctcgtgtcgtgagatgttgggttaagtcccgcaacgagcgcaacccctgtcccgtgttgccagcattcagttggggactcgcgggagactgccggcgtcaagccggaggaaggtggggacgacgtcaagtcatcatgccccttatgccctgggctgcacacgtgctacaatggccggtacagagggttgccaccccgcgagggggagcggatcccggaaagccggtcccagttcggatcgcaggctgcaacccgcctgcgtgaagtcggagttgctagtaatcgcggatcagcatgccgcggtgaatacgttcccgggcct

SEQ ID NO: 2562 - DNA, 1460 bp, Artificial Sequence; identical to SEQ ID NO: 509
  Synthetic polymer

SEQ ID NO: 2563 - DNA, 1386 bp, Artificial Sequence; identical to SEQ ID NO: 805
  Synthetic polymer

SEQ ID NO: 2564 - DNA, 1334 bp, Artificial Sequence
  Synthetic polymer
gatgaacgctggcggcacgcttaacacatgcaagtcgaacgattaaagcaccttcgggtgtgtatagagtggcgaacggctgagtaacacgtgggcaacctgcccttcagttcggaatagctacgggaaaccgtgggtaatgccggatgatccacctccctcgcatgaaggaggtggcaaagatttatcgctgaaggatgggcccgcggcctgttagcttgttggtgaggtaacggctcaccaaggcagtaatgggtagccgggttgagagaccgaccggccagattgggactgaggcacggcccagactcctacgggaggcagcagtggggaatcttgcgcaatgggcgaaagcctgacgcagcgatgccgcgtgcgggatgaaggccttcgggtcgtaaaccgctttcagcagggacgaggccgcaaggtgacggtacctgcagaagaagccccggctaactacgtgccagcagccgcggtaatacgtagggggcgagcgttatccggattcattgggcgtaaagcgcgcgtaggcggcctgttaggtcaagagttaaatccgggggctcaacccccgtccgctcctgataccggcaggcttgagtctggtaggggaaggcggaattccaagtgtagcggtggaatgcgcagatatttggaagaacaccggtggcgaaggcggccttctgggccacgactgacgctgaggcgcgaaagctaggggagcaaacaggattagataccctggtagtcctagccgtaaacgatggacactaggtgtggggggaacatccctccgtgccgcagctaacgcattaagtgtcccgcctggggagtacggccgcaaggctaaaactcaaaggaattgacgggggcccgcacaagcagcggagcatgtggcttaattcgaagcaacgcgaagaaccttaccagggcttgacatataggtgaagcggtggaaacaccgtagccgaaaggagcctatacaggtggtgcatggctgtcgtcagctcgtgtcgtgagatgttgggttaagtcccgcaacgagcgcaacccccgtcgtatgttgccagcggttcggccgggcacccatacgagaccgccggcgtcaagccggaggaaggtggggacgacgtcaagtcatcatgccccttatgtcctgggctgcacacgtgctacaatggccggcacaatgggctgccaagtcgcaagaccgagcgaatccctaaagccggccccagttcggactggaggctgcaacccgcctccatgaagtcggagttgctagtaatcgcggatcagcacgccgcggtgaatgcgttcccgggcct

SEQ ID NO: 2565 - DNA, 1368 bp, Artificial Sequence
  Synthetic polymer
agagtttgatcctggctcaagatgacctttggcggcgtgcctaacacatgcaagtcgaacggttaaggcgccttcgggcgcgcatagagtggcgaacgggtgagtaacacgtgaccaacctgccccctcctccgggacaacctcgggaaaccgaggctaataccggatgctcccgccgggccgcatggccgggcggggaaagcccaggcgggaggggatggggtcgcggcccatcaggtagtaggcggggtgacggcccacctagctgacgacgggtagccgcgctgagaggcggaccggccacattgggactgagacacggcccagactcctacgggaggcagcagtggggaattttgcgcaatggggggaaccctgacgcagcaacgccgcgtgcgggacgaaggccttcgggtcgtaaaccgctttcagcagggaagaagttgacggtacctgcagaagaagccccggctaactacgtgccagcagccgcggtaatacgtagggggcgagcgttatccggattcattgggcgtaaagcgcgcgtaggcgtcccttcaagcggcaccgtcgaagccgggggctcaacccccggaagcgggccgaactggggggatcgagtgcggtaggggaaggcggaattcccggtgtagcggtgaaatgcgcagatatcgggaagaacaccgacggcgaaggcagccttctgggccgccactgacgctgaggcgcgaaagctgggggagcgaacaggattagataccctggtagtcccagccgtaaacgatggggcgttaggtgtggggggagatgtccctccgtgccgcagccaacgcattaagcgcccccgcctggggagtacggccgcaaggctaaaactcaaaggaattgacgggggcccgcacaagcagcggagcatgtggcttaattcgaagcaacgcgaagaaccttaccagggcttgacatcaccgtgagccgccggagacggcggggccgaaaggagcggtgacaggtggtgcatggctgtcgtcagctcgtgtcgtgagatgttgggttaagtcccgcaacgagcgcaacccccgccgcgtgttgccagcattgagttgggcactcgcgcgggactgccggcgtcaagccggaggaaggtggggacgacgtcaagtcatcatgcccctcatgccctgggctgcacacgtgctacaatggccggtacagcgggctgcgacgccgcgaggcggagcgaatcccacgaagccggccccagttcggaccgcaggctgcaacccgcctgcgcgaagccggagttgctagtaatcgcggatcagcatgccgcggtgaatacgttcccgggccttgcaatcacctcccgtc

SEQ ID NO: 2566 - DNA, 1476 bp, Artificial Sequence
  Synthetic polymer
gatgaacgctggcggcgtgcctaacacatgcaagtcgaacggttaaggcgccttcgggcgcgaatagagtggcgaacgggtgagtaacgcgtggccaacctgccccctcctccgggacaacctcgggaaaccgaggctaataccggatgctccgggccccccgcatggggggcccgggaaagcccaggcgggaggggatggggccgcgtcccatcaggtagtaggcggggtgacggcccacctagctgacgacgggtagccggactgagaggtcgatcggccacattgggactgagacacggcccagactcctacgggaggcagcagtggggaattttgcgcaatgggggaaaccctgacgcagcaacgccgcgtgcgggacgaaggccttcgggtcgtaaaccgctttcggcagggaagaattttgacggtacctgcagaagaagccccggctaactacgtgccagcagccgcggtaatacgtagggggcgagcgttatccggattcattgggcgtaaagcgcgcgtaggcgtctcctcaagcggcaccgtcgaagccgggggctcaacccccggaagcgggccgaactggggggatcgagtgcggtaggggcaggcggaattcccggtgtagcggtgaaatgcgcagatatcgggaagaacaccgacggcgaaggcagcctgctgggccggcactgacgctgaggcgcgaaagctgggggagcgaacaggattagataccctggtagtcccagccgtaaacgatgggcgctaggtgtgggggagccattcctccgtgccgcagccaacgcattaagcgccccgcctggggagtacggccgcaaggctaaaactcaaaggaattgacgggggcccgcacaagcagcggagcatgtggcttaattcgaagcaacgcgaagaaccttaccagggcttgacatcaccgtgagccggcggagacgccggggccgaaaggagcggtgacaggtggtgcatggctgtcgtcagctcgtgtcgtgagatgttgggttaagtcccgcaacgagcgcaacccccgccgtatgttgccatcgggtaatgccgggcactcgtacgggaccgccggagccaatccggaggaaggcggggacgacgtcaagtcatcatgcccctcatgccctgggctgcacacgtgctacaatggccggtacaacgggccgccacgccgcgaggcggagcgaatccctcaaagccggccccagttcggatcgcaggctgcaacccgcctgcgtgaagccggagttgctagtaatcgcggatcagcatgccgcggtgaatacgttcccgggccttgtacacaccgcccgtcacaccacccgagtcgtctgcacccgaagccgccggccgaacccgaaaggggcggaggcgtcgaaggtgtggagggtgaggggggtgaagtcgtaacaaggtagccgtaccggaaggtgcggctggatc

SEQ ID NO: 2567 - DNA, 1347 bp, Artificial Sequence; identical to SEQ ID NO: 627
  Synthetic polymer

SEQ ID NO: 2568 - DNA, 1360 bp, Artificial Sequence; identical to SEQ ID NO: 1098
  Synthetic polymer

SEQ ID NO: 2569 - DNA, 1404 bp, Artificial Sequence
  Synthetic polymer
  misc_feature (491)..(491): n is a, c, g, or t
ctggcggcgcgccttacacatgcaagtcgaacggttaaagcaccctcgggtgtgcataaagtggcgaacggctgagtaacacgtgggcaacctgcccctcgcaccgggacagcctcgggaaaccgtggttaataccggatacgccccctcccccgcatgggcgaggggggaaagccccgacggcgagggatgggcccgcggcctgttagctagttggtggggtaacggcccaccaaggccattatgggtagctgggttgagagaccgaccagccagattgggactgagacacggcccagactcctacgggaggcagcagtggggaatcttgcacaatgggcgaaagcctgatgcagcgacgccgcgtgcgggacgaaggccttcgggtcgtaaaccgctttcagcagggacgaggccgcgaggtgacggtacctgcagaagaagccccggctaactacgtgccagcagccgcggtaatacgtagggggcgngcgttatccggattcattgggcgtaaagcgcgcgtaggcggcctgttaggtcgggagtcaaatccgggggctcaacccccgcccgctcccgataccggcgggcttgagtctggtaggggaaggcggaattccaagtgtagcggtggaatgcgcagatatttggaagaacaccggtggcgaaggcggccttctgggccacgactgacgctgaggcgcgaaagctaggggagcgaacaggattagataccctggtagtcctagccgtaaacgatggacactaggtgtggggggacgatccctccgtgccgcagctaacgcattaagtgtcccgcctggggagtacggccgcaaggctaaaactcaaaggaattgacgggggcccgcacaagcagcggagcatgtggcttaattcgaagcaacgcgaagaaccttaccagggcttgacatgcgggtgaagcggcggaaacgccgtggccgagaggagcccgcacaggtggtgcatggctgtcgtcagctcgtgtcgtgagatgttgggttaagtcccgcaacgagcgcaaccctcgtcgcatgttgccagcggtccggccgggcacccatgcgagaccgccggcgtcaagccggaggaaggtggggacgacgtcaagtcatcatgccccttatgtcctgggctgcacacgtgctacaatggccggcacagcgggctgccaccgcgcgagcgggagcgaatccccaaagccggccccagttcggattggaggctgcaacccgcctccatgaagtcggagttgctagtaatcgcggatcagcacgccgcggtgaatgcgttcccgggccttgtacacaccgcccgtcacaccacccgagtcgtctgcacccgaagtcgccggcccaacccgcgagggggggaggcgcc

SEQ ID NO: 2570 - DNA, 1458 bp, Artificial Sequence
  Synthetic polymer
agagtttgatcctgcctcaggatgaacgctggcggcgcgcctaacacatgcaagtcgaacggcacccgccctcgggcggaagcgagtgcggaacggctgagtaacacgtggagaacccgccccctcctccgggatagccccgggaaaccgtgggtaataccggatgaccccggcagccgcatggccggccggccaaagcccagacgggaggggatgctccgcggcccatcaggtagacggcggggtgacggcccaccgtgccgacgacgggtagccgggttgagagaccgaccggccagattgggactgagacacggcccagactctacgggaggcagcagtggggaatcttgcgcaatggggggaaccctgacgcaccgacgcccgtgcgggacgaaggccctcgggtcgtaaaccgctttcagcagggatgagacaagcggtacctgcagaagaagccccggctaactacgtgccagcagccgcggtaatacgtagggggcgaccgttatccggattcattggccgtaaagcgcgcgtaggcggcccggcaggcagggggtcaaatggcggggctcaaccccgtcccgccccctgaaccgccgggctcgggtccggtaggggagggtggaacacccggtgtagcggtggaatgcgcagatatcgggtggaacaccggtggcgaaagggcctctgggccgagaccgacgctgaggcgcgaaagctgggggagcgaacaggattagataccctggtagtcccagccgtaaacgatggacgctaggtgtgggaggggaacccttccgtgccgcagccaacgcattaacgtcccgcctggggagtacggccgcaagctaaaactcaaaggaattgacgggggcccgcacaagcggagcggagcatgtggcttaattcgaagcaacgcgaagaaccttaccagggcttgacatgcgcgtgaagccggggagacccggtggccgagaggagcgcgcacaggtggtgcatggctgtcgtcagctcgtgtcgtgagatgtttggttaagtccagcaacgagcgcaacccccgccgcatgttgccagcacctcgggtgggcacccatgcgggaccgccggagtcaatccggaggagggcggggacgacgtcaagtcatcatgccccttatgccctgggctgcacacgtgctacaatggccggtacagcgggatgcgatggcgcgagcggagcggatccctgaaagccggccccagttcggattgggggctgcaacccgcccccatgaagtcggagttgctagtaatcgcggatcagcatgccgcggtgaatgcgttcccgggccttgtacacaccgcccgtcacaccacccgagtcgtctgcacccgaagtcggcggcccaaccgagaggggggaggcgcctaaggtgtggagggtgaggggggtgaagtcgtaacaaggtaacc

SEQ ID NO: 2571 - DNA, 1334 bp, Artificial Sequence; identical to SEQ ID NO: 1020
  Synthetic polymer

SEQ ID NO: 2572 - DNA, 1366 bp, Artificial Sequence
  Synthetic polymer
ctggctcaagatgaacgctggcggcgcgctctaacacatgcaagttcgaacgattaaagcaccttcgggtgtgtataaagtcggcgaacggctgagtaacacgtcgggcaacctcgcccctctcatcgggatagccacgggaaaccgtggaataataccgaatacttcgagacttccgcatggaagaactcgagaaagctccggcggagagggatgggcccgcggcctgttagcttgttggtggggtaacggcctaccaaggcaatgatgggtagctgggttgagagaccgaccagccagattgggactgagacacggcccagactcctacgggaggcagcagtggggaatcttgcacaatgggcgaaagcctgatgcagcgacgccgcgtgcgggatgaaggccttccgggttgtaaaccgctttcagcagggacgaggcgaaagtgacggtacctgcagaagaagccccggctagctacgtgccagcagccgcggtaatacgtagggggcaagcgttatccggattcatcgggcgtaaagcgctcgtaggcggtctgttaggtcgggagttaaatccgggggctcaacccccgttcgctcccgataccggcagacttgagtttggtaggggaaggtggaattcctagtgtagcggtggaatgcgcagatattaggaagaacaccagtggcgaaggcggccttctgggccataactgacgctgaggagcgaaagctaggggagcaaacaggattagataccctggtagtcctagccgtaaacgatggacactaggtgtgggggaatatttcttccgtgccgcagctaacgcattaagtgtcccgcctggggagtacggccgcaaggctaaaactcaaaggaattgacgggggcccgcacaagcagcggagcatgtggtttaattcgaagcaacgcgaagaaccttaccagggcttgacatttaggtgaagcggcggaaacgtcgtggccgaaaggagcctaaacaggtggtgcatggctgtcgtcagctcgtgtcgtgagatgttaggttaagtcctgcaacgagcgcaaccctcgtcgtatgttgccagcggttaggccgggcacccatacgagaccgccggcgtcaagccggaggaaggtggggacgacgtcaagtcatcatgccccttatgtcctgggctacacacgtgctacaatggccggcacaatgggctgccaacccgcgagggtgagcgaatccctaaagccggtcccagttcggattggaggctgcaacccgcctccatgaagtcggagttgctagtaatcgcggatcagcacgccgcggtgaatgcgttcccgggccttgtacacaccgcccgtc

SEQ ID NO: 2573 - DNA, 1339 bp, Artificial Sequence; identical to SEQ ID NO: 350
  Synthetic polymer

SEQ ID NO: 2574 - DNA, 1357 bp, Artificial Sequence; identical to SEQ ID NO: 774
  Synthetic polymer

SEQ ID NO: 2575 - DNA, 1472 bp, Artificial Sequence; identical to SEQ ID NO: 1075
  Synthetic polymer

SEQ ID NO: 2576 - DNA, 1444 bp, Artificial Sequence
  Synthetic polymer
gatgaacgctggcggcgcgcctaacacatgcaagtcgaacgattaaagcaccttttaggtgtgtataaagtggcgaacggctgagtaacacgtgggcaacctgccctcctcttggggatagcctcgggaaaccgaggataatacccgatacttcacttgagccgcatgactcaagtgagaaagcttttgcggagaaggatgggcccgcggcctgttagcttgttggtggggtagaggcctaccaaggcaatgatgggtagctgggttgagagaccgaccagccagattgggactgagacacggcccagactcctacgggaggcagcagtggggaatcttgcacaatgggcgaaagcctgatgcagcgacgccgcgtgcgggacgaaggccttcgggttgtaaaccgctttcagcagggacgaggcgtaagtgacggtacctgcagaagaagccccggctaactacgtgccagcagccgcggtaatacgtagggggcaagcgttatccggattcattgggcgtaaagcgctcgtaggcggtctgttaggtcgggagttaaatccggaggctcaacctccgtccgctcccgataccggcagacttgagtttggtaggggaaggtggaattcctagtgtagcggtggaatgcgcagatattaggaagaacaccagtggcgaaggcggccttctgggccataactgacgctgaggagcgaaagctaggggagcaaacaggattagataccctggtagtcctagctgtaaacgatggacactaggtgtgggggagcctttcctccgtgccgcagctaacgcattaagtgtcccgcctggggagtacggccgcaaggctaaaactcaaaggaattgacggggacccgcacaagcagcggagcatgtggtttaattcgaagcaacgcgaagaaccttaccagggcttgacatataggtgaagcggcggaaacgtcgtggccgaaaggagcctatacaggtggtgcatggctgtcgtcagctcgtgtcgtgagatgttaggttaagtcctgcaacgagcgcaaccctcgtcgtatattgccagcgggtaagccgggcacctatacgagaccgccggcgtcaagccggaggaaggtggggacgacgtcaagtcatcatgccccttatgtcctgggctacacacgtgctacaatggccggcacaatgagctgccaacccgcaagggtgagcgaatctcgaaagccggccccagttcggattggaggctgcaacccgcctccatgaagtcggagttgctagtaatcgcggatcagcacgccgcggtgaatgcgttcccgggtcttgtacacaccgcccgtcacaccacccgagtcgattgcacccgaagtcgtcagcctaaccgtttggagggagacgccgaaggtgtggttggtaaggggggtgaagtcgtaac

SEQ ID NO: 2577 - DNA, 1513 bp, Artificial Sequence; identical to SEQ ID NO: 970
  Synthetic polymer

SEQ ID NO: 2578 - DNA, 1407 bp, Artificial Sequence; identical to SEQ ID NO: 44
  Synthetic polymer
  misc_feature (52)..(53): n is a, c, g, or t

SEQ ID NO: 2579 - DNA, 1355 bp, Artificial Sequence
  Synthetic polymer
agagtttgatcctggctcaggatgaacgctggcggcgcgcctaacacatgcaagtcgaacggttaaagcaccttttaggtgtgtataaagtggcgaacggctgagtaacacgtgggcaacctgccctcctcttggggatagcctcgggaaaccgaggataatacccgatacttcaatgtggccgcatgacgacattgagaaagcttttgcggagaaggatgggcccgcggcctgttagcttgttggtggggtagaggcctaccaaggcaatgatgggtagctgggttgagagaccgaccagccagattgggactgagacacggcccagactcctacgggaggcagcagtggggaatcttgcacaatgggcgaaagcctgatgcagcgacgccgcgtgcgggacgaaggccttcgggttgtaaaccgctttcagcagggacgaggcgaaagtgacggtacctgcagaagaagccccggctaactacgtgccagcagccgcggtaatacgtagggggcaagcgttatccggattcattgggcgtaaagcgctcgtaggcggtctgttaggtcgggagttaaatccggaggctcaacctccgcccgctcccgataccggcagacttgagtttggtaggggaaggtggaattcctagtgtagcggtggaatgcgcagatattaggaagaacaccagtggcgaaggcggccttctgggccataactgacgctgaggagcgaaagctaggggagcaaacaggattagataccctggtagtcctagccgtaaacgatggacactaggtgtgggggaatatttcttccgtgccgcagctaacgcattaagtgtcccgcctggggagtacggccgcaaggctaaaactcaaaggaattgacgggggcccgcacaagcagcggagcatgtggtttaattcgaagcaacgcgaagaaccttaccagggcttgacatttaggtgaagcggcggaaacgtcgtggccgaaaggagcctaaacaggtggtgcatggctgtcgtcagctcgtgtcgtgagatgttaggttaagtcctgcaacgagcgcaaccctcgtcgtatgttgccagcggttgggccgggcacccatacgagaccgccggcgtcaagccggaggaaggtggggacgacgtcaagtcatcatgccccttatgtcctgggctacacacgtgctacaatggccggcacaatgggctgccaacccgcgagggtgagcgaatccctaaagccggtcccagttcggattggaggctgcaacccgcctccatgaagtcggagttgctagtaatcgcggatcagcccgccgcggtgaataagttcccgggccttg

SEQ ID NO: 2580 - DNA, 1358 bp, Artificial Sequence
  Synthetic polymer
agagtttgatcctggctcaggacgaacgctggcggcgcgcctaacacatgcaagtcgcgcggttaaagctgcttcggcagtgcatagagcggcgaacgggcgagtaacgcgtgggcaacctgcccccctcccgggaatagccgggggaaaccccgggtaaggcccggcgacccctcggaagggcatccttccgggggcatacggaggggagggggatgggcccgcgtccgattagccagacggcggggtgacggcccaccgtggcgacgatcggtagccgggctgagaggccggacggccgcattgggactgagacacggcccagactcctacgggaggcagcagtggggaatattgcgcaatgggcgaaagcctgacgcagcgacgccgcgtgcgggaaggaggccctcgggccgtaaaccgctttcagcggggacgatcgtgactgtacccgcagaagaagccccggctaactacgtgccagcagccgcggtaatacgtagggggcgagcgttgtccggattcattgggcgtaaagcgcgcgtaggcggcccggcaggtcgggggtgaaaacacggggcccaaccccgtgcctgcccccgaaaccgccgggctcgagtcccgcaggggatggcggaactcccggtgtagcggtggaatgcgcagatatcgggaggaacaccggtggcgaaggcggccatctgggcgggcactgacgctgaggcgcgagagccgggggagcgaacaggattagataccctggtagtcccggccgtaaacgatgggcgctaggtgtgggtacttgagtatccgtgcgcagcaacgcattaagcgccccgctggggagtacggccgcaggctaaaactcaaaggaattgacgggggcccgcacaagcagcggagcatgtggcttaattcgaagcaacgcgaagaaccttacctgggcttgacgtgtcgggaaaagccggggagacccggtgtgcggaagcgcccgacgcaggtggtgcatggctgtcgtcagctcgtgccgtgaggtgttgggttaagtcccgcaacgagcgtaacccccgccgcgtgttgccatcaggtcaagctgggcacccgcgcgggaccgccggggccaacccggaggaaggtggggacgacgtcaagtcatcatgcccctcacgcccagggctgcacacgtgctacaatggccggcacagcgggttgcgacctggcgacaggaagcggatccctcaaagccggccccagttcggaccgggggctgcaacccgcccccgcgaagtcggagttgctagtaatcgcggatcagcacgccgcggtgaatgcgttcccgggccttgcacacaccgccc

SEQ ID NO: 2581 - DNA, 1449 bp, Artificial Sequence
  Synthetic polymer
  misc_feature (18)..(18): n is a, c, g, or t
  misc_feature (1402)..(1402): n is a, c, g, or t
ttgaacggagagttcgancctggctcaggatgaacgctggcggcgcgcctaacacatgcaagtcgaacgattaaagcatcttttagatgtgtataaagtggcgaacggctgagtaacacgtgggcaacctgcccttttctttgggatagctacgggaaaccgtgggtaataccgaatatttcttgagtgtcgcatggcacacaagacaaagcgtctagcggaaaaggatgggcccgcggcctgttagcttgttggtggggtaatggcctaccaaggcagttatgggtagccgggttgagagaccgaccggccagattgggactgagacacggcccagactcctacgggaggcagcagtggggaatcttgcgcaatgggggaaaccctgacgcagcgacgccgcgtgcgggatgaaggccttcgggttgtaaaccgctttcagcagggacgaggccgcaaggtgacggtacctgcagaagaagctccggctaaatacgtgccagcagccgcggtaatacgtatggagcaagcgttatccggattcattgggcgtaaagcgctcgtaggcggtctgttaggtcggtaagttaaatccgggggctcaacccccgtccgcttccgataccggcagacttgagtttggtaggggaaggtggaattcctagtgtagcggtggaatgcgcagatattaggaagaacaccggtggcgaaggcggccttctgggccataactgacgctgaggagcgaaagctaggggagcgaacaggattagataccctggtagtcctagccgtaaacgatggacactaggtgtggggggatgtaccttccgtgccgcagctaacgcattaagtgtcccgcctggggagtacgaccgcaaggttaaaactcaaaggaattgacgggggcccgcacaagcagcggagcatgtggcttaattcgaagcaacgcgaagaaccttaccagggcttgacatttaggtgaagcggcggaaacgtcgtggccgaaaggagcctaaacaggtggtgcatggctgtcgtcagctcgtgtcgtgagatgttgggttaagtcccgcaacgagcgcaacccttgtcgcatgttgccagcaggtcaagctgggcacccgtgcgagaccgccggcgtcaagccggaggaaggtggggacgacgtcaagtcatcatgccccttatgtcctgggctgcacacgtgctacaatggtcggcacagcgggaagcaaacttgcgaaagtaagccaatcccttaaagccggccccagttcggattggaggctgcaacccgcctccatgaagtcggagttgctagtaatcgcggatcagcacgccgcggtgaatgcgttcccgggccttgtacacaccgcccgtcacaccacccgagtctttngcacccgaagtcgtcggcctaacccgcaagggagggaggcgccgaag

SEQ ID NO: 2582 - DNA, 1384 bp, Artificial Sequence; identical to SEQ ID NO: 373
  Synthetic polymer

SEQ ID NO: 2583 - DNA, 1515 bp, Artificial Sequence
  Synthetic polymer
atggagagttcgatcctggctcaggatgaacgctggcggcgcgcctaacacatgcaagtcgaacggttaaagcatcttcggatgtgtataaagtggcgaacggctgagtaacacgtgggcaacctgccctttgcactgggatagcctcgggaaaccgaggttaataccggatactccatatttgtcgcatggcgaatatgggaaagctccggcggcaaaggatgggcccgcggcctgttagctagttggtggggtagtggcctaccaaggcaatgatgggtagccgggttgagagaccgaccggccagattgggactgagacacggcccagactcctacgggaggcagcagtggggaatcttgcacaatgggcgaaagcctgatgcagcgacgccgcgtgcgggatgaaggccttcgggttgtaaaccgctttcagcagggacgaggccgcaaggtgacggtacctgcagaagaagccccggctaactacgtgccagcagccgcggtaatacgtagggggcaagcgttatccggattcattgggcgtaaagcgcgcgtaggcggtctgttaggtcaggagttaaatctgggggctcaacccctatccgctcctgataccggcaggcttgagtctggtaggggaagatggaattccaagtgtagcggtgaaatgcgcagatatttggaagaacaccggtggcgaaggcggtcttctgggccatgactgacgctgaggcgcgaaagctaggggagcgaacaggattagataccctggtagtcctagctgtaaacgatggacactaggtgtggggagattatactttccgtgccgcagctaacgcattaagtgtcccgcctggggagtacggtcgcaagactaaaactcaaaggaattgacgggggcccgcacaagcagcggagcatgtggcttaattcgaagcaacgcgaagaaccttaccagggcttgacatttaggtgaagcagtggaaacactgtggccgaaaggagcctaaacaggtggtgcatggctgtcgtcagctcgtgtcgtgagatgttgggttaagtcccgcaacgagcgcaacccttgtcgcatgttgccagcggttcggccgggcacccatgcgagaccgccggcgttaagccggaggaaggtggggacgacgtcaagtcatcatgccccttatgtcctgggctgcacacgtgctacaatggccggcacagagggctgctactgcgcgagcagaagcgaatccctaaagccggtcccagttcggattggaggctgcaactcgcctccatgaagtcggagttgctagtaatcgcggatcagcacgccgcggtgaatgcgttcccgggccttgtacacaccgcccgtcacaccacccgagtcgtctgcacccgaagtcgtcggcctaacccgcaagggagggaggcgccgaaggtgtggagggtaaggggggtgaagtcgtaacaaggtagccgtaccggaaggtgcggctggatcacctcctttct

SEQ ID NO: 2584 - DNA, 1318 bp, Artificial Sequence; identical to SEQ ID NO: 884
  Synthetic polymer

SEQ ID NO: 2585 - DNA, 1367 bp, Artificial Sequence; identical to SEQ ID NO: 324
  Synthetic polymer

SEQ ID NO: 2586 - DNA, 1417 bp, Artificial Sequence; identical to SEQ ID NO: 951
  Synthetic polymer

SEQ ID NO: 2587 - DNA, 1371 bp, Artificial Sequence; identical to SEQ ID NO: 371
  Synthetic polymer

SEQ ID NO: 2588 - DNA, 1464 bp, Artificial Sequence; identical to SEQ ID NO: 506
  Synthetic polymer

SEQ ID NO: 2589 - DNA, 1371 bp, Artificial Sequence; identical to SEQ ID NO: 280
  Synthetic polymer

SEQ ID NO: 2590 - DNA, 1332 bp, Artificial Sequence; identical to SEQ ID NO: 748
  Synthetic polymer

SEQ ID NO: 2591 - DNA, 1350 bp, Artificial Sequence; identical to SEQ ID NO: 231
  Synthetic polymer

SEQ ID NO: 2592 - DNA, 1365 bp, Artificial Sequence; identical to SEQ ID NO: 563
  Synthetic polymer

SEQ ID NO: 2593 - DNA, 1369 bp, Artificial Sequence; identical to SEQ ID NO: 138
  Synthetic polymer

SEQ ID NO: 2594 - DNA, 1352 bp, Artificial Sequence
  Synthetic polymer
agagtttgatcctggctcaggatgaacgctggcggcgtgcctaacacatgcaagtcgaacgaagcactgagacttcggtttttgtgcttagtggcgaacgggtgagtaacacgtgaccaacctgccccctcctccgggacaacctcgggaaaccgaggctaataccggatactccgggccccccgcatggggagcccgggaaagccctgacgggaggggatggggtcgcggcccatcaggtagacggcggggtaacggcccaccgtgcctgcaacgggtagccgggctgagaggccgatcggccacattgggactgagacacggcccagactcctacgggaggcagcagtggggaattttgcgcaatgggggcaaccctgacgcagcgacgccgcgtgcgggacgaagtcattcgtgacgtaaaccgctttcagcgaggaagaaccatgacggtactcgcagaagaagccccggctaactacgtgccagcagccgcggtaatacgtagggggcgagcgttatccggaatcattgggcgtaaagcgcgcgcaggcgggctttcaagcggcggcgtcgaagccgggggctcaacccccggaagcgccccgaactggaagcctcggatgcggcagggggaggcggaattcccggtgtagcggtgaaatgcgcagatatcgggaagaacaccgacggcgaaggcagcctcctgggccggcatcgacgctgaggcgcgaaagctgggggagcgaacaggattagataccctggtagtcccagccgtaaacgatggacgctaggtgtgggggaggaatctcctccgtgccgaagccaacgcattaagcgtcccgcctggggagtacggccgcaaggctaaaactcaaaggaattgacgggggcccgcacaagcagcggagcatgtggcttaattcgaagcaacgcgaagaaccttaccagggcttgacataccggtgaagccggagagatccggtggccgagaggagccgatacaggtggtgcatggctgtcatcagctcgtgccgtgaggtgttgggttaagtcccgcaacgagcgcaacccccgccgcgtgttgccagcattcagttgggcactcacgcgggactgccggcgtcaagccggaggaaggcggggacgacgtcaagtcatcatgcccctcatgccctgggccgcacacgtgctacaatggccggcataacgggttgccaccccgcgagggggagcggatcccgaaagccggccccagttcggatcgcaggctgcaacccgcctgcgtgaagccggagttgctagtaatcgaggatcagcacgccgcggtgaatacgttcccgggcctt

SEQ ID NO: 2595 - DNA, 1334 bp, Artificial Sequence; identical to SEQ ID NO: 908
  Synthetic polymer

SEQ ID NO: 2596 - DNA, 1342 bp, Artificial Sequence
  Synthetic polymer
agagtttgatcctggctcaggatgaacgctggcggcgcgcctaacacatgcaagtcgaacggcacccctcctcggagggaagcgagtggcgaacggctgagtaacacgtggagaacccgccccctcctccgggatagcctcgggaaaccgtgggtaataccggatgaccccgcagggccgcatggccccgcgggcaaagcccagacgggaggggatggctccgcggcccatcaggtagacggcggggtgacggcccaccgtgccgacgacgggtagccgggttgagagaccgaccggccagattgggactgagacacggcccagactcctacgggaggcagcagtggggaatcttgcgcaatgggggaaccctgacgcagcgacgccgcgtgcgggacgaaggccctcgggtcgtaaaccgctttcagcagggatgagacaagacggtacctgcagaagaagccccggctaactacgtgccagcagccgcggtaatacgtagggggcgagcgttatccggattcattgggcgtaaagcgcgcgtaggcggcccggcaggcagggggtcaaatggcggggctcaaccccgtcccgccccctgaaccgccgggctcgggtccggtaggggagggtggaacacccggtgtagcggtggaatgcgcagatatcgggtggaacaccggtggcgaaggcggccctctgggccgagaccgacgctgaggcgcgaaagctgggggagcgaacaggattagataccctggtagtcccagccgtaaacgatggacgctaggtgtggggggacgatcactccgtgccgcagccaacgcattaagcgtcccgcctggggagtacgaccgcaaggctaaaactcaaaggaattgacgggggcccgcacaagcagcggagcatgtggcttaattcgaagcaacgcgaagaaccttaccagggcttgacatgaccgtgaagccggggagacccggtggccgagaggagcggtcacaggtggtgcatggctgtcgtcagctcgtgtcgtgagatgtttggttaagtccagcaacgagcgcaacccccgccgcgtgttgccagcattgagttgggcactcgcgcgggactgccggcgtcaagccggaggaaggtggggacgacgtcaagtcatcatgcccctcatgccctgggctgcacacgtgctacaatggccggtacagcgggctgcgacgccgcgaggcggagcgaatcccacaaagccggccccagttcggaccgcaggctgcaacccgcctgcgcgaagccggagttgctagtaatcgaggatcagcatgccgcggtgaatacgttcccgggc

SEQ ID NO: 2597 - DNA, 1439 bp, Artificial Sequence
  Synthetic polymer
gatgaacgctggcggcgcgcctaacacatgcaagtcgaacggttaaagcacctccgggtgtggataaagtggcgaacggctgagtaacacgtgggcaacctgcccctcgctccgggacagcctcgggaaaccgtgggtaataccggatactcccttgcccgcacatgcgggggaggggaaagcccagacggcgagggatgggcccgcggcctgttagctagttggcggggcaacggcccaccaaggcgattatgggtagccgggttgagagaccgaccggccagattgggactgagacacggcccagactcctacgggaggcagcagtggggaatcttgcgcaatgggcggaagcctgacgcagcgacgccgcgtgcgggaggaaggccctcgggtcgtaaaccgctttcagcagggacgaggccgcgaggtgacggtacctgcagaagaagccccggctaactacgtgccagcagccgcggtaatacgtagggggcgagcgttatccggattcattgggcgtaaagcgctcgtaggcggcccgtctggtcgggagtcaaagcccggggctcaaccccggcccgctcccgataccggcgggcttgagtcgcgcaggggaggccggaattccgggtgtagcggtggaatgcgcagatatccggaagaacaccggtggcgaaggcggacctctgggcgcgcactgacgctgaggagcgaaagctgggggagcgaacaggattagataccctggtagtcccagccgtaaacgatgggcactaggtgtggggggatacgccctccgtgccgcagctaacgcattaagtgccccgcctggggagtacggccgcaaggctaaaactcaaaggaattgacgggggcccgcacaagcagcggagcatgtggcttaattcgaagcaacgcgaagaaccttaccagcgcttgacatgctagtgaagcggcggagacgccgtggccgagaggagctagcacaggtggtgcatggctgtcgtcagctcgtgtcgtgagatgttgggttaagtcccgcaacgagcgcaacccccgtcgcatgttgccagcggtccggccgggcacccatgcgagaccgccggcgtcaagccggaggagggtggggacgacgtcaagtcatcatgccccttatgcgctgggccgcacacgtgctacaatggccggcacaacgggctgccacgccgcgaggcggagcgaatcccaaaagccggccccagttcggaccgggggctgcaacccgcccccgcgaagtcggagttgctagtaatcgcggatcagcacgccgcggtgaatgcgttcccgggccttgtacacaccgcccgtcacaccacccgagtcgtttgcacccgaagccgccggcccaacccctcgcggggagggaggtgtcgaaggtgcggtcggtaaggggggtg

SEQ ID NO: 2598 - DNA, 1365 bp, Artificial Sequence
  Synthetic polymer
agagtttgatcctggctcaggatgaacgctggcggcgcgcctaacacatgcaagtcgaacggcacccctcctcggagggaagcgagtggcgaacggctgagtaacacgtggagaacccgccccctcctccgggatagcctcgggaaaccgtgggtaataccggatgaccccgcagggccgcatggccccgcgggcaaagcccagacgggaggggatggctccgcggcccatcaggtagacggcggggtgacggcccaccgtgccgacgacgggtagccgggttgagagaccgaccggccagattgggactgagacacggcccagactcctacgggaggcagcagtggggaatcttgcgcaatggggggaaccctgacgcagcgacgccgcgtgcgggacgaaggccctcgggtcgtaaaccgctttcagcagggatgagacaagacggtacctgcagaagaagccccggctaactacgtgccagcagccgcggtaatatgtagggggcgagcgttatccggattcattgggcgtaaagcgcgcgtaggcggccgcgtaggcggggggtcaaatcccggggctcaaccccggtccgccccccgaaccccgcggctcgggtccggtaggggagggtggaattcccggtgtagcggtggaatgcgcagatatcgggaggaacaccggtggcgaaggcggccctctgggccgagaccgacgctgaggcgcgaaagctgggggagcgaacaggattagataccctggtagtcccagccgtaaacgatggacgctaggtgtggggggacgatccctccgtgccgcagccaacgcattaagcgtcccgcctggggagtacggccgcaaggccaaaactcaaaggaattgacgggggcccgcacaagcagcggagcatgtggcttaattcgaagcaacgcgaagaaccttaccagggcttgacatgtgcgtgaagccggggagacccggtggccgagaggagcgcacacaggtggtgcatggctgtcgttagctcgtgtcgtgagatgttgggttaagtcccgcaacgagcgcaacccccgccgcatgttgccagcaggtcaggctgggcacccatgcgggaccgccggcgtcaagccggaggagggcggggacgacgtcaagtcatcatgccccttatgccctgggctgcacacgtgctacaatggccggtacagcgggatgcgatggcgcgagccggagcggatccctcaaagccggccccagttcggattgggggctgcaacccgcccccatgaagtcggagttgctagtaatcgcggatcagcatgccgcggtgaatgcgttcccgggccttgcacacaccgcccgtca

SEQ ID NO: 2599 - DNA, 1364 bp, Artificial Sequence
  Synthetic polymer
agagtttgatcctggctcaggatgaacgctggcggcgcgcctaacacatgcaagtcggacggcacccaccctcgggtggaagcgagtggcgaacggctgagtaacacgtggagaacccgccccctcctccgggatagcctcgggaaaccgtgggtaataccggatgaccccgcagggccgcatggccccgcgggcaaagcccagacgggaggggatggctccgcggcccatcaggtagacggcggggtgacggcccaccgtgccgacgacgggtagccgggttgagagaccgaccggccagattgggactgagacacggcccagactcctacgggaggcagcagtggggaatcttgcgcaatggggggaaccctgacgcggcgacgccgcgtgcgggacgaaggccctcgggtcgtaaaccgctttcagcagggatgagacaagacggtacctgcagaagaagccccggctaactacgtgccagcagccgcggtaatacgtagggggcgagcgttatccggattcattgggcgtaaagcgcgcgtaggcggcccggcaggcagggggtcaaatggcggggctcaaccccgtcccgccccctgaaccgccgggctcgggtccggtaggggagggtggaacacccggtgtagcggtggaatgcgcagatatcgggtggaacaccggtggcgaaggcggccctctgggccgagaccgacgctgaggcgcgaaagctgggggagcgaacaggattagataccctggtagtcccagccgtaaacggtggacgctaggtgtggggggacgatccctccgtgccgcagccaacgcattaagcgtcccgcctggggagtacggccgcaaggctaaaactcaaaggaattgacgggggcccgcacaagcagcggagcatgtggcttaattcgaagcaacgcgaagaaccttaccagggcttgacatgaccgcgaagccggggagacccggcggccgagaggagcggtcacaggtggtgcatggctgtcgtcagctcgtgtcgtgagatgtttggttaagtccagcaacgagcgcaacccccgccgcatgttgccagcacctcgggtgggcacccatgcgggaccgccggagtcaatccggaggagggcggggacgacgtcaagtcatcatgccccttatgccctgggctgcacacgtgctacaatggccggtacagcgggatgcgatggcgcgaggtggagcaaatcccagaaaaccgatcgtagtccggattgcagtctgcaactcgactgcatgaagtcggaatcgctagtaatcgcggatcagcatgccgcggtgaatacgttcccgggtgttgtacacaccgcccgtca

SEQ ID NO: 2600 - DNA, 1432 bp, Artificial Sequence; identical to SEQ ID NO: 872
  Synthetic polymer

SEQ ID NO: 2601 - DNA, 1367 bp, Artificial Sequence; identical to SEQ ID NO: 464
  Synthetic polymer

SEQ ID NO: 2602 - DNA, 1366 bp, Artificial Sequence
  Synthetic polymer
agagtttgatcctggctcaggatgaacgctggcggcgtgcctaacacatgcaagtcgaacgatgaaaccgccctcgggcggacatgaagtggcgaacgggtgagtaacacgtgaccaacctgccccttgctccgggacaaccttgggaaaccgaggctaataccggatactcctcgcccccctcctggggggcccgggaaagcccagacggcaagggatggggtcgcggcccattaggtagtaggcggggtaacggcccacctagcccgcgatgggtagccggactgagaggtcgaccggccacattgggactgagatacggcccagactcctacgggaggcagcagtggggaattttgcacaatgggggaaaccctgacgcagcaacgccgcgtgcgggacgaaggccttcgggttgtaaaccgctttcagcagggaagactttgacggtacctgcagaagaagctccggctaactacgtgccagcagccgcggtaatacgtagggggcgagcgttatccggattcattgggcgtaaagcgcgcgtaggcggccgcctaagcggaacctctaatcccggggctcaacctcgggccgggttccggactgggcggctcgagtgcggtagaggcaggcggaattcccggtgtagcggtggaatgcgcagatatcgggaagaacaccgatggcgaaggcagcctgctgggccgccactgacgctgaggcgcgaaagctgggggagcgaacaggattagataccctggtagtcccagccgtaaacgatgggcggttaggaggggggggtccttccccccgtgcggcagccaacgcattaagcgccccgcctggggagtagggccgcaaggctaaaactcaaaggaattgacgggggcccgcacaagcagcggagcatgtggcttaattcgaagcaacgcgaagaacctttccagggcttgacatgcgagtgaagccgcggagacgcggtggccgagaggagctcgcgcaggtggtgcatggctgtcgtcagctcgtgtcgtgagatgttgggttaagtcccgcaacgagcgcaacccccgtcccgtgttgccagcattgagttggggactcgcgggagactgccggcgtcaagccggaggaaggtggggacgacgtcaagtcatcatgccccttatgccctgggctgcacacgtgctacaatggccggtacagagggttgccaccccgcgagggggagcggatcccggaaagccggtcccagttcggatcgcaggctgcaacccgcctgcgtgaagtcggagttgctagtaatcgcggatcagcatgccgcggtgaatacgttcccgggccttgcacacaccgcccgtca

SEQ ID NO: 2603 - DNA, 1365 bp, Artificial Sequence
  Synthetic polymer
agagtttgatcctggctcaggatgaacgctggcggcgcgcctaacacatgcaagtcgaacggcacccctctccggagggaagcgagtggcgaacggctgagtaacacgtggagaacctgccccctcccccgggatagccgcccgaaaggacgggtaataccggataccccggggtgccgcatggcaccccggctaaagccccgacgggaggggatggctccgcggcccatcaggtagacggcggggtgacggcccaccgtgccgacaacgggtagccgggttgagagaccgaccggccagattgggactgagacacggcccagactcctacgggaggcagcagtggggaatcttgcgcaatggggggaaccctgacgcagcgacgccgcgtgcgggacggaggccttcgggtcgtaaaccgctttcagcagggaagagtcaagactgtacaagcagaagaagccccggctaactacgtgccagcagccgcggtaatacgtagggggcgagcgttatccggattcattgggcgtaaagcgcgcgtaggcggcccggcaggccgggggtcgaagcggggggctcaaccccccgaagcccccggaacctccgcggcttgggtccggtaggggagggtggaacacccggtgtagcggtggaatgcgcagatatcgggtggaacaccggtggcgaaggcggccctctgggccgagaccgacgctgaggcgcgaaagctgggggagcgaacaggattagataccctggtagtcccagccgtaaacgatggacgctaggtgtggggggacgatccccccgtgccgcagccaacgcattaagcgtcccgcctggggagtacggccgcaaggctaaaactcaaaggaattgacgggggcccgcacaagcagcggagcatgtggcttaattcgaagcaacgcgaagaaccttaccagggcttgacatatgggtgaagcgggggagaccccgtggccgagaggagcccatacaggtggtgcatggctgtcgtcagctcgtgtcgtgagatgttgggttaagtcccgcaacgagcgcaacccccgccgcgtgttgccatcgggtgatgccgggaacccacgcgggaccgccgccgtcaaggcggaggagggcggggacgacgtcaagtcatcatgccccttatatcctgggctacacacgtaatacaatggcggtcaacagagggaagcaaagccgcgaggcagagcaaacccccaaaagccgtcccagttcggatcgtaggctgcaactcgcctgcgtgaagtcggaatcgctagtaatcgcggatcagcatgccgcggtgaatacgttcccgggccttgtacacaccgcccgtca

SEQ ID NO: 2604 - DNA, 1419 bp, Artificial Sequence
  Synthetic polymer
gatgaacgctggcggcgtgcctaacacatgcaagtcgaacgattaaaccgtcctcggacggacatagagtggcgaacgggtgagtaacacgtgaccaacctgccccccgctccgggacaaccttgggaaaccgaggctaataccggatactcctcgcccccctcctggggggcccgggaaagcccagacggcgggggatggggtcgcggcccattaggtagacggcggggtaacggcccaccgtgcctgcgatgggtagccgggttgagagaccgaccggccacattgggactgagatacggcccagactcctacgggaggcagcagtggggaattttgcgcaatgggggaaaccctgacgcagcaacgccgcgtgcgggatgacggccttcgggttgtaaaccgctttcagcagggaagaaattcgacggtacctgcagaagaagctccggctaactacgtgccagcagccgcggtaatacgtagggagcgagcgttatccggattcattgggcgtaaagagcgcgtaggcggcctttcaagcgggatctctaatccgagggctcaacccccggccggatcccgaactgggaggctcgagttcggtagaggcaggcggaattcccggtgtagcggtggaatgcgcagatatcgggaagaacaccgatggcgaaggcagcctgctgggccgaaactgacgctgaggcgcgaaagctaggggagcgaacaggattagataccctggtagtcctagccgtaaacgatgggcgctaggtgtggggagggtcatcctctccgtgcccgcagctaacgcattaagcgccccgcctggggagtacggccgcaaggctaaaactcaaaggaattgacgggggcccgcacaagcagcggagcatgtggcttaattcgaagcaacgcgaagaaccttaccagggcttgacatgctagtgaagccggggaaacccggtggccgagaggagctagcgcaggtggtgcatggctgtcgtcagctcgtgtcgtgagatgttgggttaagtcccgcaacgagcgcaacccctatcgcatgttgccagcattcagttggggactcatgcgagactgccggcgtcaagccggaggaaggtggggacgacgtcaagtcatcatgccctttatgccctgggctgcacacgtgctacaatggccggtacaacgggctgcgaactcgcgagagtgagcgaatcccttaaagccggccccagttcggatcggaggctgcaacccgcctccgtgaagtcggagttgctagtaatcgcggatcagcatgccgcggtgaatacgttcccgggccttgtacacaccgcccgtcacaccacccgagtcgtctgcacccgaagccgccggccgaacccgcaaggggcggaggcgtcgaaggtgtgg

SEQ ID NO: 2605 - DNA, 1330 bp, Artificial Sequence; identical to SEQ ID NO: 104
  Synthetic polymer

SEQ ID NO: 2606 - DNA, 1469 bp, Artificial Sequence; identical to SEQ ID NO: 51
  Synthetic polymer

SEQ ID NO: 2607 - DNA, 1471 bp, Artificial Sequence
  Synthetic polymer
gatgaacgctggcggcgcgcctaacacatgcaagtcgaacggttaaggcatccctcgggatgcgaatagagtggcgaacggctgagtaacacgtgggcaacctgcccccctccccggaatagcctcgcgaaagcgggattaatgccggatactccgccatcccccgcatgggggaggcgggaaagcccagacggagggggatgggcccgcggcctgttagctagttggcggggcaacggcccaccaacgcgactatgggtagccgggttgagagaccgaccggccagattgggactgagacacggcccagactcctacgggaggcagcagtggggaatcttgcgcaatggggggaaccctgacgcagcgacgccgcgtgcgggacgaaggccctcgggtcgtaaaccgctttcagcagggaagaggccgaaaggtgacggtacctgcagaagaagccccggctaaatacgtgccagcagccgcggtaatacgtatggggcgagcgttatccggattcattgggcgtaaagcgcgcgtaggcggcctcgtaggccgggagtcaaatccgggggctcaacccccgcccgctcccggaaccccgaggcttgagtctggcaggggagggtggaattcccagtgtagcggtggaatgcgcagatattgggaagaacaccggtggcgaaggcggccctctgggccacgactgacgctgaggcgcgaaagctgggggagcgaacaggattagataccctggtagtcccagccgtaaacgatggacgctaggtgtggggggacgatccccccgtgccgcagccaacgcattaagcgtcccgcctggggagtacggccgcaaggctaaaactcaaaggaattgacgggggcccgcacaagcagcggagcatgtggcttaattcgaagcaacgcgaagaaccttacctgggcttgacattcaggtgaagcggcggagacgccgtggccgagaggagcctgaacaggtggtgcatggctgtcgtcagctcgtgtcgtgagatgttgggttaagtcccgcaacgagcgcaacccccgtcgcgtgttgccagcggttaggccgggcacccgcgcgagaccgccggcgtcaagccggaggaaggtggggacgacgtcaagtcatcatgccccttatgtccagggctgcacacgtgctacaatggccggcacagcgggctgcgactgcgcgagcaggagcgaatccctcaaagccggccccagttcggaccgggggctgcaacccgcccccgcgaagtcggagttgctagtaatcgcggatcagcacgccgcggtgaatgcgttcccgggccttgtacacaccgcccgtcacaccacccgagtcgtctgcacccgaagtcgccggcccaaccagcaatggggggaggcgccgaaggtgtggagggtaaggggggtgaagtcgtaacaaggtagccgtacgggaacg

SEQ ID NO: 2608 - DNA, 1409 bp, Artificial Sequence; identical to SEQ ID NO: 1131
  Synthetic polymer

SEQ ID NO: 2609 - DNA, 1426 bp, Artificial Sequence
  Synthetic polymer
tgcctaacacatgcaagtcgaacgatgaaaccgccctcgggcggacatgaagtggcgaacgggtgagtaacacgtgaccaacctgcccccctctccgggacaaccttgggaaaccgaggctaataccggatactccctcccctgctcctgcaggggtcgggaaagcccaggcggagggggatggggtcgcggcccattaggtagtaggcggggtaacggcccacctagcccgcgatgggtagccgggttgagagaccgaccggccacattgggactgagatacggcccagactcctacgggaggcagcagtggggaattttgcgcaatgggggcaaccctgacgcagcaacgccgcgtgcgggacgacggccttcgggttgtaaaccgctttcagcagggaagaaattcgacggtacctgcagaagaagctccggctaactacgtgccagcagccgcggtaatacgtagggagcgagcgttatccggattcattgggcgtaaagagcgcgtaggcggcctctcaagcgggatctctaatccgagggctcaacccccggccggatcccgaactgggaggctcgagttcggtagaggcaggcggaattcccggtgtagcggtggaatgcgcagatatcgggaagaacaccgatggcgaaggcagcctgctgggccgcaactgacgctgaggcgcgaaagctaggggagcgaacaggattagataccctggtagtcctagccgtaaacgatggatactaggtgtggggggctccgccctccgtgccgcagccaacgcattaagtatcccgcctggggagtacggccgcaaggctaaaactcaaaggaattgacgggggcccgcacaagcagcggagcatgtggcttaattcgaagcaacgcgaagaaccttaccagggcttgacatggacgtgaagccggggaaacccggtggccgagaggagcgtccgcaggtggtgcatggctgtcgtcagctcgtgtcgtgagatgttgggttaagtcccgcaacgagcgcaacccctgccccatgttgccagcattaggttggggactcatgggggactgccggcgtcaagccggaggaaggtggggacgacgtcaagtcatcatgccctttatgccctgggctgcacacgtgctacaatggccggtacaacgggctgcgagaccgcgaggtcgagcgaatccctcaaagccggccccagttcggatcggaggctgcaacccgcctccgtgaagtcggagttgctagtaatcgcggatcagcatgccgcggtgaatacgttcccgggccttgtacacaccgcccgtcacaccacccgagtcgtctgcacccgaagccgccggccgaacccgcaaggggcggaggcgtcgaaggtgtggagggtaaggggggtgaagtcgtaacaa

SEQ ID NO: 2610 - DNA, 1387 bp, Artificial Sequence
  Synthetic polymer
  misc_feature (56)..(56): n is a, c, g, or t
  misc_feature (60)..(60): n is a, c, g, or t
  misc_feature (62)..(62): n is a, c, g, or t
acatgcagtcgaacggttaagccaccttcgggtgggcatacagtggcgaacgggtnattnanacgtgaccaacctgccccttgctccgggacaacctcgggaaaccgaggctaataccggatgctccggcccctccgcatggaggggccgggaaagcctggcgcggcaagggatggggtcgcggcccatcaggtagacggcggggtagcggcccaccgtgctttcgacgggtagccgggttgagagaccgaccggccacattgggactgagatacggcccagactcctacgggaggcagcagtggggaattttgcgcaatgggggcaaccctgacgcagcaacgccgcgtgcgggatgacggccttcgggttgtaaaccgctttcagcagggaagaccgacgacggtacctgcagaagaagccccggctaactacgtgccagcagccgcggtaatacgtagggggcgagcgttatccggattcattgggcgtaaagcgcgcgtaggcggcgcgccaagcggaacctctaacctcggggctcaacctcgagccgggttccgaactggcgcgctcgagttcggtagaggcaggcggaattcccggtgtagcggtggaatgcgcagatatcgggaagaacaccgatggcgaaggcagcctgctgggccgacactgacgctgaggtgcgaaagctaggggagcgaacaggattagataccctggtagtcctagccgtaaacgatggacgctaggtgtggggaggatcgcctctccgtgccgaagccaacgcattaagcgtcccgcctggggagtacggccgcaaggctaaaactcaaaggaattgacggggggcccgcacaagcagcggagcatgtggcttaaattcgaagcaacgcgaagaaccttaccaggggcttgacatgcgagtgaagccgggaagacccggtggccgagaggagctcgcgcaggtggtgcatggctgtcgtcagctcgtgtcgtgagatgttgggttaagtcccgcaacgagcgcaacccctgccgtatgttgccagcattgagttggggactcatacgggactgccggcgtcaagccggaggaaggtggggacgacgtcaagtcatcatgccctttatgccctgggctgcacacgtgctacaatggccggtacaacgggctgcgacctggcgacaggaagcgaatccctcaaagccggccccagttcggatcggaggctgcaacccgcctccgtgaagtcggagttgctagtaatcgcggatcagcatgccgcggtgaatacgttcccgggccttgtacacaccgcccgtcacaccacccgagtcgtctgcacccgaagccgccggccgaacccgaaaggggcggaggctcaag

SEQ ID NO: 2611 - DNA, 1365 bp, Artificial Sequence
  Synthetic polymer
agagtttgatcctggctcaggacgaacgctggcggcgtgcttaacacatgcaagtcgaacgagagaattgctagcttgctaataattctctagtggcgcgcgggtgagtaacacgtgagtaacctgcccctgagagcgggatagccctgggaaactgggattaataccgcatagaatcgcaagattaaactccccaggaaagccttaacggcgcgggatggggtcgcggcccattaggtagacggcggggtaacggcccaccgtgcccgcgattggtagccggactgagaggtcgaccgaccacattgggagtgagatacggcccagactcctacgggaggcagcagtggggaattttgcgcaatgggggaaaccctgacgcagcaacgccgcgtgcgtgatgaaggccttcgggttgtaaaccgctttcagcagggaagactttgacggtacctgcagaagaagctccggctaactacgtgccagcagccgcggtaatacgtagggggcgagcgttatccggattcattgggcgtaaagcgcgcgtaggcgtccgcataagcggaacctctaatcccggggctcaacctcgggccgggttccggactgggcggctcgagtgcggtagaggcaggcggaattcccggtgtagcggtggaatgcgcagatatcgggaagaacaccgatggcgaaggcagcctgctgggccgccactgacgctgaggcgcgaaagctgggggagcgaacaggattagataccctggtagtcccagccgtaaacgatgggcgctaggtgtggggggacagtccccccgtgccgcagccaacgcattaagcgccccgcctggggagtacggccgcaaggctaaaactcaaaggaattgacgggggcccgcacaagcagcggagcatgtggcttaattcgaagcaacgcgaagaaccttaccagggcttgacatgcgagtgaagccgcggagacgcggtggccgagaggagctcgcgcaggtggtgcatggctgtcgtcagctcgtgtcgtgagatgttgggttaagtcccgcaacgagcgcaacccccgtcccgtgttgccagcattgagttggggactcgcgggagactgccggcgtcaagccggaggaaggtggggacgacgtcaagtcatcatgccccttatgccctgggctgcacacgtgctacaatggccggtacagagggttgccaccccgcgagggggagcggatcccggaaagccggtcccagttcggatcgcaggctgcaacccgcctgcgtgaagtcggagttgctagtaatcgcggatcagcatgccgcggtgaatacgttcccgggccttgcactcaccgcccgtca

SEQ ID NO: 2612 - DNA, 1333 bp, Artificial Sequence; identical to SEQ ID NO: 1022
  Synthetic polymer

SEQ ID NO: 2613 - DNA, 1467 bp, Artificial Sequence
  Synthetic polymer
gatgaacgctggcggcgtgcctaacacatgcaagtcgaacgatgaaaccgccctcgggcggacatgaagtggcgaacgggtgagtaacacgtgaccaacctgccccttgctccgggacaaccttgggaaaccgaggctaataccggatactcctcgcccccctcctggggggcccgggaaagcccagacagcaagggatgggcccgcggcctgttagctagttggcggggcaacggcccaccaaggcgattatgggtagccgggttgagagaccgaccggccagattgggactgagacacggcccagactcctacgggaggcagcagtggggaatcttgcgcaatgggcggaagcctgacgcagcgacgccgcgtgcgggaggaaggccctcgggtcgtaaaccgctttcagcagggacgaggccgcgaggtgacggtacctgcagaagaagccccggctaactacgtgccagcagtcgcggtaatacgtagggggcgagcgttatccggattcattgggcgtaaagcgctcgtaggcggcccgtctggtcgggagtcaaagcccggggctcaaccccggcccgctcccgataccggcgggcttgagtcgcgcaggggaggccggaattccgggtgtagcggtggaatgcgcagatatccggaagaacaccggtggcgaaggcggacctctgggcgcgcactgacgctgaggagcgaaagctgggggagcgaacaggattagataccctggtagtcccagccgtaaacgatgggcactaggtgtggggggatacgccctccgtgccgcagctaacgcattaagtgccccgcctggggagtacggccgcaaggctaaaactcaaaggaattgacgggggcccgcacaagcagcggagcatgtggcttaattcgaagcaacgcgaagaaccttaccagcgcttgacatgctagtgaagcggcggagacgccgtggccgagaggagctagcacaggtggtgcatggctgtcgtcagctcgtgtcgtgagatgttgggttaagtcccgcaacgagcgcaacccccgtcgcatgttgccagcggtccggccgggcacccatgcgagaccgccggcgtcaagccggaggagggtggggacgacgtcaagtcatcatgccccttatgcgctgggccgcacacgtgctacaatggccggcacaacgggctgccacgccgcgaggcggagcgaatcccaaaagccggccccagttcggaccgggggctgcaacccgcccccgcgaagtcggagttgctagtaatcgcagatcagcatgccgcggtgaatacgttcccgggccttgtacacaccgcccgtcacaccacccgagtcgtctgcacccgaagccgccggccgaacccgcaaggggcggaggcgtcgaaggtgtggagggtaaggggggtgaagtcgtaacaaggtagccgtaccggaagg

SEQ ID NO: 2614 - DNA, 1367 bp, Artificial Sequence; identical to SEQ ID NO: 312
  Synthetic polymer

SEQ ID NO: 2615 - DNA, 1385 bp, Artificial Sequence; identical to SEQ ID NO: 804
  Synthetic polymer

SEQ ID NO: 2616 - DNA, 1466 bp, Artificial Sequence
  Synthetic polymer
  misc_feature (1022)..(1022): n is a, c, g, or t
  misc_feature (1025)..(1025): n is a, c, g, or t
  misc_feature (1391)..(1391): n is a, c, g, or t
  misc_feature (1419)..(1419): n is a, c, g, or t
  misc_feature (1424)..(1424): n is a, c, g, or t
  misc_feature (1440)..(1440): n is a, c, g, or t
  misc_feature (1460)..(1460): n is a, c, g, or t
ttagagtttgatttcctgctcaggatgaacgctggcggcgtgcttaacacatgcaagtcgaacgattaaggcggcttcggccgcgtatagagtggcgaacgggtgagtaacacgtgaccaacctgccccgcgctccgggacaaccgctggaaacggcggctaataccggatactccggccagcccgcatgggcgggccgggaaagcccttacggcgcgggatggggtcgcggcccattaggtagtaggcggggtaacggcccacctagcccgcgatgggtagccggactgagaggtcgaccggccacattgggactgagatacggcccagactcctacgggaggcagcagtggggaattttgcgcaatgggggaaaccctgacgcagcaacgccgcgtgcgggacgacggccctcgggttgtaaaccgctttcagtggggacgacgatgacggtacccacagaagaagctccggctaactacgtgccagcagccgcggtaatacgtagggagcgagcgttatccggattcattgggcgtaaagcgcgcgtaggcggctgcctaagcggaacctctaaccccggggctcaacctcgggccgggttccgaactgggcggctcgagtgcggtagaggcaggcggaattcccggtgtagcggtggaatgcgcagatatcgggaagaacaccgatggcgaaggcagcctgctgggccgccactgacgctgaggcgcgaaagctgggggagcgaacaggattagataccctggtagtcccagccgtaaacgatgggcgctaggtgtggggggacagtccctccgtgccgcagccaacgcattaagcgccccgcctggggagtacggccgcaaggctaaaactcaaaggaattgacgggggcccgcacaagcagcggagcatgtggcttaattcgaagcaacgcgaagaaccttaccagggcttgacgtgctagtgaagccgcggaaacgcggtggccgagaggagctagcgcaggtggtgcatggctntcntcagctcgtgtcgtgagatgttgggttaagtcccgcaacgagcgcaacccccgtcccgtgttgccagcattcagttggggactcgcgggagactgccggcgttaagccggaggaaggtggggacgacgtcaagtcatcatgccccttatgccctgggctgcacacgtgctacaatggccggtacagagggctgcgacgccgcgaggcggagcgaatcccaaaaagccggccccagttcggatcgcaggctgcaacccgcctgcgtgaagtcggagttgctagtaatcgcggatcagcatgccgcggtgaatacgttcccgggccttgtacacaccgcccgtcacaccacccgagtcgtctgcaccngaagccgccggccgaacccttcctgggncgtanttgtggaaggtgtggnaaataaggggggttaagtcntaacaa

SEQ ID NO: 2617 - DNA, 1459 bp, Artificial Sequence; identical to SEQ ID NO: 516
  Synthetic polymer

SEQ ID NO: 2618 - DNA, 1407 bp, Artificial Sequence; identical to SEQ ID NO: 556
  Synthetic polymer

SEQ ID NO: 2619 - DNA, 1474 bp, Artificial Sequence
  Synthetic polymer
agagtttgatcatggctcaggatgaacgctggcggcgtgcctaacacatgcaagtcgaacggttaaaccgccctcgggcggacatacagtggcgaacgggtgagtaacacgtgaccaacctgccccgcgctccgggacaaccgctggaaacggcggctaataccggatactccgcggcccccgcatgggggcggcgggaaagccccgacggcgcgggatggggtcgcggcccattaggtagtaggcggggtagaggcccacctagccgacgatgggtagccggactgagaggtcgatcggccacattgggactgagatacggcccagactcctacgggaggcagcagtggggaattttgcgcaatggggggaaccctgacgcagcaacgccgcgtgcgggacgaaggccctcgggtcgtaaaccgctttcagcagggaagaccttacgacggtacctgcagaagaagctccggctaactacgtgccagcagccgcggtaatacgtagggggcgagcgttatccggattcattgggcgtaaagcgcgcgtaggcggccgcctaagcggaacctctaaccccggggctcaacctcgggccgggttccggactgggcggctcgagtgcggtagaggagagcggaattcccggtgtagcggtggaatgcgcagatatcgggaagaacaccgatggcgaaggcagctctctgggccgtcactgacgctgaggcgcgaaagctgggggagcgaacaggattagataccctggtagtcccagccgtaaacgatgggcgctaggtgtggggggatcccccctccgtgccgcagccaacgcattaagcgccccgcctggggagtacggccgcaaggctaaaactcaaaggaattgacgggggcccgcacaagcagcggagcatgtggcttaattcgaagcaacgcgaagaaccttaccagggcttgacatgcgcctgaagccgcggagacgcggtggccgagaggagggcgcgcaggtggtgcatggctgtcgtcagctcgtgtcgtgagatgttgggttaagtcccgcaacgagcgcaacccccgtcccgtgttgccagcattaggttggggactcgcgggagactgccggcgtcaagccggaggaaggtggggacgacgtcaagtcatcatgccccttatgccctgggctgcacacgtgctacaatggccggtacagagggttgccaccccgcgagggggagcggatcccggaaagccggccccagttcggatcgcaggctgcaacccgcctgcgtgaagccggagttgctagtaatcgcggatcagcacgccgcggtgaatacgttcccgggccttgtacacaccgcccgtcacaccacccgagtcgtctgcacccgaagccgccggccgaacccccccctgggggcggaggcgtcgaaggtgtggagggtaaggggggtgaagtcgtaacaaggtaacc

SEQ ID NO: 2620 - DNA, 1416 bp, Artificial Sequence; identical to SEQ ID NO: 934
  Synthetic polymer

SEQ ID NO: 2621 - DNA, 1345 bp, Artificial Sequence; identical to SEQ ID NO: 770
  Synthetic polymer

SEQ ID NO: 2622 - DNA, 1351 bp, Artificial Sequence; identical to SEQ ID NO: 337
  Synthetic polymer

SEQ ID NO: 2623 - DNA, 1480 bp, Artificial Sequence
  Synthetic polymer
gatgaacgctggcggcgtgcttaacacatgcaagtcgaacgattaaaccgccctcgggcggaaatagagtggcgaacgggtgagtaacacgtgaccaacctgccccgcgctccgggacaaccgctggaaacggcggctaataccggatactccggccagcccgcatgggccggccgggaaagccttcacggcgcgggatggggtcgcggcccattaggtagtaggcggggtaacggcccacctagcccgcgatgggtagccggactgagaggtcgaccggccacattgggactgagatacggcccagactcctacgggaggcagcagtggggaattttgcgcaatgggggaaaccctgacgcagcaacgccgcgtgcgggacgacggccctcgggttgtaaaccgctttcagtggggacgatggtgacggtacccacagaagaagctccggctaactacgtgccagcagccgcggtaatacgtagggagcgagcgttatccggattcattgggcgtaaagcgcgcgtaggcggctgcctaagcggaacctctaatcccggggctcaacctcgggccgggttccgaactgggcggctcgagtgcggtagaggcaggcggaattcccggtgtagcggtggaatgcgcagatatcgggaagaacaccgatggcgaaggcagcctgctgggccgtcactgacgctgaggcgcgaaagctgggggagcgaacaggattagataccctggtagtcccagccgtaaacgatgggcgctaggtgtggggggaccatccctccgtgccgcagccaacgcattaagcgccccgcctggggagtacggccgcaaggctaaaactcaaaggaattgacgggggcccgcacaagcagcggagcatgtggcttaattcgaagcaacgcgaagaaccttaccagggcttgacatgcgagtgaagccggggaaacccggtggccgagaggagctcgcgcaggtggtgcatggctgtcgtcagctcgtgtcgtgagatgttgggttaagtcccgcaacgagcgcaacccctgtcccgtgttgccagcattcagttggggactcgcgggagactgccggcgttaagccggaggaaggtggggacgacgtcaagtcatcatgccccttatgccctgggctgcacacgtgctacaatggccggtacagagggctgcgacgccgcgaggcggagcgaatcccaaaaagccggccccagttcggatcgcaggctgcaacccgcctgcgtgaagtcggagttgctagtaatcgcggatcagcatgccgcggtgaatacgttcccgggccttgtacacaccgcccgtcacaccacccgagtcgtctgcacccgaagccgccggccgaacccgcaaggggcggaggtgtcgaaggtgtggagggtaaggggggtgaagtcgtaacaaggtagccgtaccggaaggtgcggctggatcacctcctt

SEQ ID NO: 2624 - DNA, 1366 bp, Artificial Sequence
  Synthetic polymer
agagtttgatcctggctcaggatgaacgctggcggcgcgcctaacacatgcaagtcgaacgacaccccacctcggtgggaagcgagtggcgaacggctgagtaacacgtggagaacccgccccctcctccgggatagcctcgggaaaccgtgggtaataccggatgacgcccggacgacgcatgtcgcccgggccaaagcccagacgggaggggatggctccgcggcccatcaggtagacggcggggtgaaggcccaccgtgccgacgacgggtagccgggttgagagaccgaccggccagattgggactgagacacggcccagactcctacgggaggcagcagtggggaatcttgcgcaatggggggaaccctgacgcagcgacgccgcgtgcgggacgaaggccctcgggtcgtaaaccgctttcagcagggatgagacaagacggtacctgcagaagaagccccggctaactacgtgccagcagccgcggtaatacgtagggggcgagcgttatccggattcattgggcgtaaagcgcgcgtaggcggccgcgtaggcggggggtcaaatcccggggctcaaccccggtccgccccccgaaccccgcggctcgggtccggtaggggagggtggaacacccggtgtagcggtggaatgcgcagatatcgggtggaacaccggtggcgaaggcggccctctgggccgagaccgacgctgaggcgcgaaagctgggggagcgaacaggattagataccctggtagtcccagccgtaaacgatggacgctaggtgtgggggggcgattcccccgtgccgcagccaatgcattaagcgttccgacaggggagtacggccgcaaggctaagactcaaaggaattgacgggggcgcgcacaagcaagcggagcatgtggcttaattaggaagcaacgagaagtacattaccagggcatgacatgttggtgaagcgggggagaccccgcgaccgagaggagccaacacaggtggtgcatggctgtcgtcagctcgtgtcgtgagatgtttggttaagtccagcaacgagcgcaacccccgctgcatgttgccatcaggtagagctgggcacccatgcgggaccgccggagtcaatccggaggagggcggggacgacgtcaagtcatcatgccccttatgccctgggctgcacacgtgctacaatggccggtacagcgggatgcgatggcgcgagccggagcggatccctcaaagccggccccagttcggattgggggctgcaacccgcccccatgaagtcgagttgctagtaatcgcggatcagcatgccgcggtgaatgcgaacccgggccttgcactcaccgcccgtca

SEQ ID NO: 2625 - DNA, 1366 bp, Artificial Sequence; identical to SEQ ID NO: 111
  Synthetic polymer

SEQ ID NO: 2626 - DNA, 1361 bp, Artificial Sequence; identical to SEQ ID NO: 92
  Synthetic polymer

SEQ ID NO: 2627 - DNA, 1464 bp, Artificial Sequence; identical to SEQ ID NO: 927
  Synthetic polymer

SEQ ID NO: 2628 - DNA, 1411 bp, Artificial Sequence
  Synthetic polymer
gatgaacgctggcggcgtgcctaacacatgcaagtcgaacgatgaaaccgccctcgggcggacatgaagtggcgaacgggtgagtaacacgtgaccaacctgccccttgctccgggacaaccttgggaaaccgaggctaataccggatactcctcgcccccctcctggggggcccgggaaagcccagacggcaagggatggggtcgcggcccattaggtagtaggcggggtaacggcccacctagcccgcgatgggtagccgggttgagagaccgaccggccacattgggactgagatacggcccagactcctacgggaggcagcagtggggaattttgcgcaatgggggcaaccctgacgcagcaacgccgcgtgcgggacgacggccttcgggttgtaaaccgctttcagcagggaagaaattcgacggtacctgcagaagaagctccggctaactacgtgccagcagccgcggtaatacgtagggagcgagcgttatccggattcattgggcgtaaagagcgcgtaggcggcctctcaagcgggatctctaatccgagggctcaacccccggccggatcccgaactgggaggctcgagttcggtagaggcaggcggaattcccggtgtagcggtggaatgcgcagatatcgggaagaacaccgatgacgaaggcagcctgctgggccgcaactgacgctgaggcgcgaaagctaggggagcgaacaggattagataccctggtagtcctagccgtaaacgatggatactagggtgtggggggctccgccctccgtgccgcagccaacgcattaagtatcccgcctggggagtacggccgcaaggctaaaactcaaaaggaaattgacgagggcccgcacaagcagcggagcatgtggattaattcgaaacaacgcgaataaccctttccagggcttgacatggacgtgaagccggggaaaacctgtgaccgagaggagcgtccgcaggtggtgcatggctgtcgtcagctcgtgtcgtgagatgttgggttaagtcccgcaacgagcgcaacccctgccccatgttgccagcattaggttggggactcatgggggactgccggcgtcaagccggaggaaggtggggatgacgtcaagtcatcatgccctttatgccctgggctgcacacgtgctacaatggccggtacaacgggctgcgagaccgcgaggtcgagcgaatccctcaaagccggccccagttcggatcggaggctgcaacccgcctccgtgcagtcggagttgctagtaatcgcggatcagcatgccgcggtgaatacgttcccgggccttgtacacaccgcccgtcacaccacccgagtcgtctgcacccgaagccgaaaaccgaacccgcaaggggcggaggcgtcg

SEQ ID NO: 2629 - DNA, 1369 bp, Artificial Sequence
  Synthetic polymer
agagtttgatcctggctcaggatgaacgctggcggcgtgcctaacacatgcaagtcgaacggttaaggcgccttcgggcgcgaatagagtggcgaacgggtgagtaacgcgtggccaacctgccccctcctccgggacaacctcgggaaaccgaggctaataccggatgctccgggccccccgcatggggggcccgggaaagcccaggcgggaggggatggggccgcgtcccatcaggtagtaggcggggtgacggcccacctagctgacgacgggtagccggactgagaggtcgatcggccacattgggactgagacacggcccagactcctacgggaggcagcagtggggaattttgcgcaatggggggaaccctgacgcagcaacgccgcgtgcgggacgaaggccttcgggtcgtaaaccgctttcggcagggaagaattttgacggtacctgcagaagaagccccggctaactacgtgccagcagccgcggtaatacgtagggggcgagcgttatccggattcattgggcgtaaagcgcgcgtaggcgtctcctcaagcggcaccgtcgaagccgggggctcaacccccggaagcgggccgaactggggggatcgagtgcggtaggggcaggcggaattcccggtgtagcggtgaaatgcgcagatatcgggaagaacaccgacggcgaaggcagcctgctgggccggcactgacgctgaggcgcgaaagctgggggagcgaacaggattagataccctggtagtcccagccgtaaacgatgggcgctaggtgtgggggagccattcctccgtgccgcagccaacgcattaagcgccccgcctggggagtacggccgcaaggctaaaactcaaaggaattgacgggggcccgcacaagcagcggagcatgtggcttaattcgaagcaacgcgaagaaccttaccagggcttgacatcaccgtgagccggcggagacgccggggccgaaaggagcggtgacaggtggtgcatggctgtcgtcagctcgtgtcgtgagatgttgggttaagtcccgcaacgagcgcaacccccgccgtatgttgccatcgggtaatgccgggcactcgtacgggaccgccggagccaatccggaggaaggcggggacgacgtcaagtcatcatgcccctcatgccctgggctgcacacgtgctacaatggccggtacaacgggccgccacgccgcgaggcggagcgaatccctcaaagccggccccagttcggatcgcaggctgcaacccgcctgcgtgaagccggagttgctagtaatcgcggatcagcatgccgcggtgaatacgttcccgggccttgtactcaccgcccgtca

SEQ ID NO: 2630 - DNA, 1335 bp, Artificial Sequence
  Synthetic polymer
  misc_feature (518)..(518): n is a, c, g, or t
gatgaacgctggcggcgcgcctaacacatgcaagtcgaacgagtaagacgccttcgggcgtggatagagtggcgaacgggtgagtaacacgtgaccaacctgccccctcctccgggacaacctcgggaaaccgaggctaataccggatactccgggcaccccgcatgggatgcccgggaaagccctggcgggaggggatggggtcgcggcccatcaggtagacggcggggtaacggcccaccgtgcctgcaacgggtagccgggctgagaggccgatcggccacattgggactgagacacggcccagactcctacgggaggcagcagtggggaattttgcgcaatgggggcaaccctgacgcagcgacgccgcgtgcgggacgaagtcattcgtgacgtaaaccgctttcagcgaggaagaaccatgacggtactcgcagaagaagccccggctaactacgtgccagcagccgcggtaatacgtagggggcgagcgttatccggaatcattgggcgtnaagcgcgcgcaggcgggctttcaagcggcggcgtcgaagccgggggctcaacccccggaagcgccccgaactggaagcctcggatgcggcagggggaggcggaattcccggtgtagcggtgaaatgcgcagatatcgggaaaaaacaccgacgggcgaaggcagcctcctgggccggcatcgacgctgaggcgcgaaagctgggggagcgaacaggattagataccctggtagtcccagccgtaaacgatggacgctaggtgtggggggaacatccctccgtgccgaagccaacgcattaagcgtcccgcctggggagtacggccgcaaggctaaaactcaaaggaattgacgggggcccgcacaagcagcggagcatgtggcttaattcgaagcaacgcgaagaaccttaccagggcttgacatacgggtgaagccggagagatccggtggccgagaggagcccatacaggtggtgcatggctgtcgtcagctcgtgccgtgaggtgttgggttaagtcccgcaacgagcgcaacccccgccgcgtgttgccagcattcagttgggcactcacgcgggactgccggcgtcaagccggaggaaggcggggacgacgtcaagtcatcatgcccctcatgccctgggccgcacacgtgctacaatggccggcacaacgggttgccaccccgcgagggggagcggatccctaaagccggccccagttcggatcgcaggctgcaacccgcctgcgtgaagccggagttgctagtaatcgcggatcagcacgccgcggtgaataaattcccgggccttgcac

SEQ ID NO: 2631 - DNA, 1327 bp, Artificial Sequence; identical to SEQ ID NO: 1072
  Synthetic polymer

SEQ ID NO: 2632 - DNA, 1344 bp, Artificial Sequence
  Synthetic polymer
gatgaacgctggcggcgcgcctaacacatgcaagtcgaacggttaagacgcactttcggtgcgtgcatagagttggcgaacggctgagtaacacgtgggcaacctgccccccgcaccgggatagcctcgcgaaagcgtgattaataccgggtactccggcacctccgcatggcggtgccgggagagcgttagcggcgggggatgggcccgcggcctgttagctagttggcggggcaacggcccaccaaggcgattatgggtagccgggttgagagaccgaccggccagattgggactgagacacggcccagactcctacgggaggcagcagtggggaatcttgcgcaatggggggaaccctgacgcagcgacgccgcgtgcgggacgaaggccctagggtcgtaaaccgctttcagcagggaagaggccgcaaggtgacggtacctgcagaagaagccccggctaaatacgtgccagcagccgcggtaatacgtatggggcgagcgttatccggattcattgggcgtaaagcgcgcgtaggcggcctggcaggccgggagtcaaatccgggggctcaacccccgcccgctcccggaacctccgggcttgagtctggcaggggagggtggaatacccggtgtagcggtggaatgcgcagatatcgggtagaacaccggtgggcgaaggcggccctctgggccacgactgacgctgaggcgcgaaagctgggggagcgaacaggattagataccctggtagtcccagccgtaaacgatggacgctaggtgtggggggacgatcccccccgtgccgcagccaacgcactaagcgtcccgcctggggagtacggccgcaaggctaaaactcaaaggaattgacgggggcccgcacaagcagcggagcatgtggcttaattcgaagcaacgcgaagaaccttacctgggcttgacattcaggtgaagcggcggagacgccgtggccgagaggagcctgaacaggtggtgcatggctgtcgtcagctcgtgtcgtgagatgttgggttaagtcccgcaacgagcgcaacccccgccgcgtgttgccagcaggtgaagctgggcacccgcgcgggaccgccggcgtcaagccggaggagggtggggacgacgtcaagtcatcatgccccttatgtccagggctgcacacgtgctacaatggccggcacaacgggctgcgaacccgcgagggcgagcgaatcccttaaagccggccccagttcggaccgggggctgcaacccgcccccgcgagttcggagttgctagtaatcgcggttcggcgcgccgcggtgtaatgcgtttcccgggcct

SEQ ID NO: 2633 - DNA, 1365 bp, Artificial Sequence; identical to SEQ ID NO: 687
  Synthetic polymer

SEQ ID NO: 2634 - DNA, 1460 bp, Artificial Sequence; identical to SEQ ID NO: 501
  Synthetic polymer

SEQ ID NO: 2635 - DNA, 1341 bp, Artificial Sequence; identical to SEQ ID NO: 1069
  Synthetic polymer

SEQ ID NO: 2636 - DNA, 1431 bp, Artificial Sequence
  Synthetic polymer
tgcctaacacatgcaagtcgaacagatgataaccagccactcgggcggacatgaagtggcgaacgggtgagtaacagcgtgaccaacctgccccctcgctccgggacaaccttgggaaaccgaggctaataccggatactccttgccccgcctcctgggagggctccgggaaagcccaggacggcaaggggatggggtcgcggcccattaggtagtaggcggggtaacggcccacctagcccgcgatgggtagccgggttgagagaccgaccggccacattgggactgagatacggcccagactcctacgggaggcagcagtggggaattttgcgcaatgggggaaaccttgacgcagcaacgcgcgcgtgcgggacgacggccttcgggttagtaaaccgctttcagcagggaagaaattacgacggtacctgcagaagaagactaccaggctaactacgtgccagcagccgcggtaatacgtagggagcgagcgttatccggattcattgggcgtaaagagcgcgtaggcggcctctcaagcgggatctctaatccgagggctcaacccccggccggatcccgaactgggaggctcgagttcggtagaggcaggcggaattcccggtgtagcggtggaatgcgcagatatcgggaagaacaccgatggcgaaggcagcctgctgggccgcaactgacgctgaggcgcgaaagctaggggagcgaacaggattagataccctggtagtcctagccgtaaacgatggatactaggtgtggggggctccgccctccgtgccgcagccaacgcattaagtatcccgcctggggagtacggctcgcaaggctataaactcaaaggaatttgacgggggcaccgcacaagcaccggagcatgtggcttaattcgaagcaacgcgaagaaccttaccagggcttcgacatggaccgtgatagccggggaaacccggtggccgagaggagcgtcacgcaggtggtgacatggctgtctgtcgagtctcgtgtcgtgagtatgttagggttaagatgcccgcatacggagcgcaaaccccatgccccatgttgccagcattaggttggggactcatgggggactgccggcgtacaagccggaggaaggtggggacggacgtgcaagtcatcatgccctttatgccctgggctgcacacgtgctacaatggccggtacaacgggctgcgagaccgcgaggtcgagcgagatccctcaaagccggccccagttcggatcggaggctgcaacccgcctccgtgaagtcggagttgctagtaatcgcggatcagcatgccgcggtgaatacgttcccgggccttgtacacaccgcccgtcacaccacccgagtcgtctgcacccgaagccgccggcccgaacccgcaaggggcggaggcgtc

SEQ ID NO: 2637 - DNA, 1330 bp, Artificial Sequence; identical to SEQ ID NO: 789
  Synthetic polymer

SEQ ID NO: 2638 - DNA, 1373 bp, Artificial Sequence; identical to SEQ ID NO: 294
  Synthetic polymer

SEQ ID NO: 2639 - DNA, 1370 bp, Artificial Sequence; identical to SEQ ID NO: 653
  Synthetic polymer

SEQ ID NO: 2640 - DNA, 1370 bp, Artificial Sequence
  Synthetic polymer
agagtttgattctggctcaggatgaacgctagcgacaggcctaacacatgcaagtcgaggggcaacatggtatcagcttgctgatactgatggcgaccggcgcacgggtgagtaacgcgtatgtaatctacctgtaacagagggataacccggagaaatccggactaatacctcatagcacatattattcgcatgaattttatgttaaagagactcggttacagatgaacatgcgttccattagctagttggcggggttacggcccaccaaggcaacgatggataggggttctgagaggaaggtcccccacactggtactgagacacggaccagactcctacgggaggcagcagtgaggaatattggtcaatgggcgaaagcctgaaccagccaagtcgcgtggaggaagacggccctacgggttgtaaactccttttacctgggaataacgggcgctacgtgtagcgctgtgcaagtaccgggagaataagcatcggctaattccgtgccagcagccgcggtaatacggaagatgcgagcgttatccggatttattgggtttaaagggtgcgtaagcggaagaataagtcagcggtgaaatgcttcagctcaactggagaattgccgatgaaactgtttttctagagtataaaagaggtatgcggaatgcgtggtgtagcggtgaaatgcatagatatcacgcagaaccccgatttcgaaggcagcatactgggctataactgacgctgaagcacgaaagcgtgggtatcgaacaggattaggtaccctggtagtccacgccgtaaacgctgaaaggtaaactgtttgcgatataaagtaagcggtacagcgaaagaggtcaagtattccccctggggagtacgccggcaacggtgaaaaatcaaaggaattgacgggggcccgcacaagcggaggaacatgtggtttaatttgatgatacgcgaggaacctttacccgggctcaaacgacaggggaataatcccgaaaaggataaacctgcaatggccgctgtcgaggtgctgcatggttgtcgtcagctcgtgccgtgaggtgtcggcttaagtgccataacgagcgcaacccttcccggtagttattaacaggtcaagctgaggactctaccgggactgccagcgcaagctgtgaggaaggtggggaggacgtcaaatcagcacggcccttacgtccggggcgacacacgtgttacaatggcaggtacagagagtcgcgtcgtagcaatacgtagccaatcccgaaaacctgtctcagttcggatcggagtctgtaactcgactccgtgaagctggattcgctagtaatcgcgcatcagccatggcgcggtgaata

SEQ ID NO: 2641 - DNA, 1461 bp, Artificial Sequence
  Synthetic polymer
tcaggatgaacgctagcgacaggcctaacacatgcaagtcgaggggcagcgcggaggtagcaatacttctggcggcgaccggcgcacgggtgagtaacacgtatgcaatctgcctgtaacagggggataacccggagaaatccggcctaataccccataacgacatatcttcgcatggggagatgtctaaagagagcaatcttggttacagatgagcatgcggtccattagccagttggcggggtaacggcccaccaaagcgacgatggataggggttctgagaggaaggtcccccacattggaactgagacacggtccaaactcctacgggaggcagcagtgaggaatattggtcaatggtcggcagactgaaccagccaagtcgcgtgaaggaagacggccctacgggttgtaaacttcttttgtcggagagtaaagtgcgctacgcgtagcgtattgcaagtatccgaagaaaaagcatcggctaactccgtgccagcagccgcggtaatacggaggatgcgagcgttatccggatttattgggtttaaagggtgcgtaggcggcacgccaagtcagcggtgaaatgcccgggcttaacccgggagctgccgttgaaactgcgagctagcgtgcacaagaggcaggcggaatgcgtggtgtagcggtgaaatgcatagatatcacgcagaaccccgattgcgaaggcagcctgctagggtgcaacggacgctgaggcacgaaagcgtggggatcgaacaggattagataccctggtagtccacgcagtaaacgatgaatactaactgtttgcgatataatgtaagcggtacagcgaaagcgttaagtattccacctggggagtacgccggcaacggtgaaactcaaaggaattgacgggggcccgcacaagcggaggaacatgtggtttaattcgatgatacgcgaggaaccttacccgggctcaaacgcagggggaatatgggtgaaagtccatagccagcaatggtcgcctgcgaggtgctgcatggttgtcgtcagctcgtgccgtgaggtgtcggcttaagtgccataacgagcgcaaccctattgacagttactaacgggtcaagccgaggactctgtcgagactgccggcgcaagccgcgaggaaggtggggatgacgtcaaatcagcacggcccttacgtccggggcgacacacgtgttacaatggcaggtacagaaggcagccagtcagcaatgacgcgcgaatcccgaaaacctgtctcagttcggattggagtctgcaactcgactccatgaagctggattcgctagtaatcgcgcatcagccatggcgcggtgaatacgttcccgggccttgtacacaccgcccgtcaagccatggaagccgggagtacctgaagcatgcaaccgcaaggagcgtacgaaggtaataccggtaactggggctaagtc

SEQ ID NO: 2642 - DNA, 1453 bp, Artificial Sequence
  Synthetic polymer
atgaacgctagcgacaggcctaacacatgcaagtcgaggggcagcatggtatcagcttgctgataccgatggcgaccggcgcacgggtgagtaacgcgtatgtaatctgcctgtaacagagggataacccggagaaatccggcctaatacctcataatacatattattcgcatgagttttatgttaaagaaatttggttacagatgaacatgcgttccattagctagttggcggggtaacggcccaccaaggcgacgatggataggggttctgagaggaaggtcccccacactggtactgagacacggaccagactcctacgggaggcagcagtgaggaatattggtcaatgggcgagagcctgaaccagccaagtcgcgtggaggaagactgccctacgggttgtaaactccttttacctgggaataacgggcgttacgtgtaatgcagtgcaagtaccaggagaataagcatcggctaattccgtgccagcagccgcggtaatacggaagatgcgagcgttatccggatttattgggtttaaagggtgcgtaggcggaagaataagtcagcggtgaaatgcttcagcttaactggagaattgccgatgaaactgtttttctagagtataaaagaggtatgcggaatgcgtggtgtagcggtgaaatgcatagatatcacgcagaaccccgattgcgaaggcagcatactgggctataactgacgctgaagcacgaaagcgtgggtatcgaacaggattagataccctggtagtccacgccgtaaacgatgaatactaactgtttgcgatataatgtaagcggtacagcgaaagcgttaagtattccacctggggagtacgccggcaacggtgaaactcaaaggaattgacgggggcccgcacaagcggaggaacatgtggtttaattcgatgatacgcgaggaaccttacccgggctcaaacgacaggggaatggccccgaaaagggtcagccagcaatggtcgctgtcgaggtgctgcatggttgtcgtcagctcgtgccgtgaggtgtcggcttaagtgccataacgagcgcaacccttaccggtagttactaacaggtcaagctgaggactctaccgggactgccagcgcaagctgtgaggaaggtggggatgacgtcaaatcagcacggcccttacgtccggggcgacacacgtgttacaatggcaggtacagagagtcgcggcgtagcaatacgtagccaatccccaaaacctgtctcagttcggatcggagtctgcaactcgactccgtgaagctggattcgctagtaatcgcgcatcagccatggcgcggtgaatacgttcccgggccttgtacacaccgcccgtcaagccatgggagccgggagtacctgaagtatgcaaccgcaaggagcgtcctagggtaatactggtgactggggctaag

SEQ ID NO: 2643 - DNA, 1439 bp, Artificial Sequence; identical to SEQ ID NO: 975
  Synthetic polymer

SEQ ID NO: 2644 - DNA, 1451 bp, Artificial Sequence; identical to SEQ ID NO: 1039
  Synthetic polymer

SEQ ID NO: 2645 - DNA, 1452 bp, Artificial Sequence; identical to SEQ ID NO: 1120
  Synthetic polymer

SEQ ID NO: 2646 - DNA, 1396 bp, Artificial Sequence; identical to SEQ ID NO: 583
  Synthetic polymer

SEQ ID NO: 2647 - DNA, 1383 bp, Artificial Sequence
  Synthetic polymer
cctggctcaggatgaacgctagcgacaggcctaacacatgcaagtcgaggggcaacatggtatcagcttgctgataccgatggcgaccggcgcacgggtgagtaacgcgtatgtaatctacctgtaacagagggataacccggagaaatccggactaatacctcatagcacatattattcgcatgaattttatgttaaagagactcggttacagatgaacatgcgttccattagctggttggcggggtcacggcccaccaaggcaacgatggataggggttctgagaggaaggtcccccacactggtactgagacacggaccagactcctacgggaggcagcagtgaggaatattggtcaatgggcggaagcctgaaccagccaagtcgcgtggaggaagacggccctacgggttgtaaactccttttacctgggaataacgggcgctacgcgtagcgctgtgcaagtaccgggagaataagcatcggctaattccgtgccagcagccgcggtaatacggaagatgcgagcgttatccggatttattgggtttaaagggtgcgtaggcggaagaataagtcagcggtgaaatgcttcagctcaactggagaattgccgatgaaactgtttttctagagtataaaagaggtatgcggaatgcgtggtgtagcggtgaaatgcatagatatcacgcagaacctcgattgcgaaggcagcatactgggctataactgacgctgaagcacgaaagcgtgggtatcgaacaggattagataccctggtagttcacgccgtacacgatgaatactcactgtttgcgatataatgtaagctgtacagcgaaagcgttaagtattgcacctggggagtacgccggcaacggtgaaactcaaaggaattgacgggggcccgcacaagcggaggaacatgtggtttaattcgatgatacgcgaggaaccttacccgggctcaaacggcaggggaataatcccgaaaaggattagccagcaatggtcgctgtcgaggtgcagcatggttgtcgtcagctcgtcccgtgaggtgtcggcttaagtgccataacgagcgcaacccttaccggtagttactaacaggtcaagctgaggactctaccgggactgccagcgcaagctgtgaggaaggtggggatgacgtcaaatcagcacggcccttacgtccggggcgacacacgtgttacaatggcaggtacagagagtcgcttcgtagcaatacgtagccaatcccaaaaacctgtctcagttcggatcggagtctgcaactcgactccgtgaagctggattcgctagtaatcgcgcatcagccatggcgcggtgaatacgttcccaggccttgtacacaccgccc

SEQ ID NO: 2648 - DNA, 1402 bp, Artificial Sequence; identical to SEQ ID NO: 335
  Synthetic polymer

SEQ ID NO: 2649 - DNA, 1393 bp, Artificial Sequence; identical to SEQ ID NO: 285
  Synthetic polymer

SEQ ID NO: 2650 - DNA, 1441 bp, Artificial Sequence; identical to SEQ ID NO: 937
  Synthetic polymer

SEQ ID NO: 2651 - DNA, 1436 bp, Artificial Sequence
  Synthetic polymer
gcgacaggcctaacacatgcaagtcgaggggcagcggagaggtagcaatacctttgccggcgaccggcgcacgggtgagtaacacgtatgcaatccacctgtaacagggggataacccggagaaatccggactaataccccataatatgggctctccgcatggagggtccattaaagagagcaattttggttacagacgagcatgcgctccattagccagttggcggggtaacggcccaccaaagcgacgatggataggggttctgagaggaaggtcccccacattggaactgagacacggtccaaactcctacgggaggcagcagtgaggaatattggtcaatggtcggcagactgaaccagccaagtcgcgtgagggaagacggccctacgggttgtaaacctcttttgtcggagagtaaagtacgctacgtgtagcgtattgcaagtatccgaagaaaaagcatcggctaactccgtgccagcagccgcggtaatacggaggatgcgagcgttatccggatttattgggtttaaagggtgcgtaggcggcacgccaagtcagcggtgaaattttcgggctcaacccggactgtgccgttgaaactggcgagctagagtgcacaagaggcaggcggaatgcgtggtgtagcggtgaaatgcatagatatcacgcagaaccccgattgcgaaggcagcctgctagggtgcgacagacgctgaggcacgaaagcgtgggtatcgaacaggattagataccctggtagtccacgcagtaaacgatgaatactaactgtttgcgatacaatgtaagcggtacagcgaaagcgttaagtattccacctggggagtacgccggcaacggtgaaactcaaaggaattgacgcgggcccgcacaagcggaggaacatgtggtttaattggatgatacgcgaggaaccttacccgggttcaaacgcagggggaatatatatgaatgtatatagctagcaatactcacgtgggaggtgcttcatggttgtcgtcagctcgtgccgtgaggtgttggctcaagtgccataacgagcgcaacccctgtccatagttgccatcaggtcgttctgggcactctgtggagactgcctccgtaaggtgtgaggaaggtggggatgacgtcaaatcagcacgtcccttacgtccggggctacacacgtgttacaatggggcatacagcgacttggatgtgcgcaagaacgtccggatcaataaagtgcctgtcagttcggactggggtctgcaacccgacctcaggaagctggattctctagtattcgagcatcagccatggcgcggtgaatacgttcccgggccttgtacaccccgcccgtcaagccatgaaagccgggggcgcctgaagtccgtgaacgggagggtcggcctagggtgaaaccggtgat

SEQ ID NO: 2652 - DNA, 1457 bp, Artificial Sequence; identical to SEQ ID NO: 924
  Synthetic polymer

SEQ ID NO: 2653 - DNA, 1398 bp, Artificial Sequence; identical to SEQ ID NO: 456
  Synthetic polymer

SEQ ID NO: 2654 - DNA, 1405 bp, Artificial Sequence
  Synthetic polymer
agagtttgttcctggctcaggatgaacgctagcgacaggcctaacacatgcaagtcgaggggcagcggggaggtagcaatacctttgccggcgaccggcgcacgggtgagtaacacgtatgcaatccacctgtaacagggggataacccggagaaatccggactaataccccatgatatgggctctccgcatggagggtccattaaagagagcaatcttggttacagacgagcatgcgctccattagccagttggcggggtaacggcccaccaaggcgacgatggataggggttctgagaggaaggtcccccacattggaactgagacacggtccaaactcctacgggaggcagcagtgaggaatattggtcaatggtcggcagactgaaccagccaagtcgcgtgagggaagacggccctacgggttgtaaacctcttttgtcggagagtaaagtgcgctacgcgtagcgtattgcaagtatccgaagaaaaagcatcggctaactccgtgccagcagccgcggtaatacggaggatgcgagcgttatccggatttattgggtttaaagggtgcgtaggcggcacgccaagtcagcggtgaaatttccgggctcaacccggactgtgccgttgaaactggcgagctagagtgcacaagaggcaggcggaatgcgtggtgtagcggtgaaatgcatagatatcacgcagaaccccgattgcgaaggcagcctgctagggtgcgacagacgctgaggcacgaaagcgtgggtatcgaacaggattagatacccccggaatgtccacacagtaagagaggaattataactgtttgagatcacaatgtaagcggcacagcgaaagctgttaggtattccacttggggagtagcgcgggcacgggtgaaatctcaaagaaatgggcgggggccggcccaagcgaaggaccaggtggtttaattggatgataggggaggacctttaccggggtctgaaacagagggaagatttatgaaagaggatttccatcaagggtcagaaactaggtgctgcatggttgtcgtcagctcgtgccgtgaggtgtcggcttaagtgccataacgagcgcaacccctatggacagttactaacgggtgaagccgaggactctgtctagactgccggcgcaagccgcgaggaaggtggggatgacgtcaaatcagcacggcccttacgtccggggcgacacacgtgttacaatggcaggtacagaaggcagccagtcagcaatgacgcgcgaatcccgaaaacctgtctcagttcggattggagtctgcaacccgactccatgaagctggattcgctagtaatcgcgcatcagccatggcgcggtgaatacgttcccgggccttgcacacaccgcccgtca

SEQ ID NO: 2655 - DNA, 1360 bp, Artificial Sequence
  Synthetic polymer
gatgaacgctagcgacaggcctaacacatgcaagtcgaggggcagcacagttgaagcttgcttcaatgggtggcgaccggcgcacgggtgagtaacgcgtatggaaccaacccgcaacagggggataacccggagaaatccggactaataccgcatagtacagggaatacagaagtattttttgttaaagagcaatcggttgcggacggtcatgcgttccattagctagttggcggggtaacggcccaccaaggcgacgatggataggggttctgagaggaaggtcccccacactggtactgagacacggaccagactcctacgggaggcagcagtgaggaatattggtcaatgggcgagagcctgaaccagccaagtcgcgtgagggaagacggccctatgggttgtaaacctcttttagatgagagtaaaggtatctacgtgtaggtatttgcaagtatcatcagaataagcatcggctaattccgtgccagcagccgcggtaatacggaagatgcgagcgttatccggatttattgggtttaaagggtgcgtaggcgggttgttaagtcagcggtgaaatgcatcagcttaactggtgaattgccattgaaactggcgaccttgagtgtagcggaagtatgcggaatgtgtggtgtagcggtgaaatgcatagatatcacgcagaactccgattgcgaaggcagcataccatactacaactgacgctgaagcacgaaagcgtgggtatcgaacaggattagataccctggtagtccacgcagtaaacgatgaatactaaccgtttgcgatagaatgtaagcggtagagcgaaagcgttaagtattccacctggggagtacgccggcaacggtgaaactcaaaggaattgacgggggcccgcacaagcggaggaacatgtggtttaattcgatgatacgcgaggaaccttacccgggctcaaacgacaggggaatatataagaaattatatagccagcaatggtcgctgtcgaggtgctgcatggttgtcgtcagctcgtgccgtgaggtgtcggcttaagtgccataacgagcgcaacccttattgatagttactaacaggtaaagctgaggactctattgagactgccggcgtaagccgcgaggaaggtggggatgacgtcaaatcagcacggcccttacgtccggggcgacacacgtgttacaatggcggggacagagagcagccaggtggtgacaccgagctaatcccgaaaccctgtctcagttcggattggagtctgcaactcgactccatgaagctggattcgctagtaatcgcgcatcagccatggcgcggtgaatacgttcccgggcct

SEQ ID NO: 2656 - DNA, 1398 bp, Artificial Sequence; identical to SEQ ID NO: 189
  Synthetic polymer

SEQ ID NO: 2657 - DNA, 1398 bp, Artificial Sequence
  Synthetic polymer
agagtttgttcctggctcaggatgaacgctagcgacaggcctaacacatgcaagtcgaggggcagcggggaggtagcaatacctttgccggcgaccggcgcacgggtgagtaacacgtatgcaatccacctgtaacagggggataacccggagaaatccggactaataccccatgatatgggctctccgcatggagggtccattaaagagagcaatcttggttacagacgagcatgcgctccattagccagttggcggggtaacggcccaccaaggcgacgatggataggggttctgagaggaaggtcccccacattggaactgagacacggtccaaactcctacgggaggcagcagtgaggaatattggtcaatggtcggcagactgaaccagccaagtcgcgtgagggaagacggccctacgggttgtaaacctcttttgtcggagagtaaagtgcgctacgcgtagcgtattgcaagtatccgaagaaaaagcatcggctaactccgtgccagcagccgcggtaatacggaggatgcgagcgttatccggatttattgggtttaaagggtgcgtaggcggcacgccaagtcagcggtgaaatttccgggctcaacccggactgtgccgttgaaactggcgagctagagtgcacaagaggcaggcggaatgcgtggtgtagcggtgaaatgcatagatatcacgcagaaccccgattgcgaaggcagcctgctagggtgcgacagacgctgaggcacgaaagcgtgggtatcgaacaggattagataccctggtagtccacgcagtaaacgatgaatactaactgtttgcgatacaatgtaagcggtacagcgaaagcgttaagtattccacctggggagtacgccggcaacggtgaaactcaaaggaattgacgggggcccgcacaagcggaggaacatgtggtttaattcgatgatacgcgaggaaccatacccgggcttaaattgcaaatgaattatggggaaacccataggccgtaaggcatttgtgaaggtgctgcatggttgtcgtcagctcgtgccgtgaggtgtcggcttaagtgccataacgagcgcaacccttatcttcagttactaacaggtcatgctgaggactctggagagactgccgtcgtaagatgtgaggaaggtggggatgacgtcaaatcagcacggcccttacgtccggggctacacacgtgttacaatggggggtacagaaggccgctacctggtgacaggatgccaatcccaaaaacctctctcagttcggatcgaagtctgcaacccgacttcgtgaagctggattcgctagtaatcgcgcatcagccatggcgcggtgaatacgttcccgggtcttgcacacaccgcccgtca

SEQ ID NO: 2658 - DNA, 1388 bp, Artificial Sequence; identical to SEQ ID NO: 892
  Synthetic polymer

SEQ ID NO: 2659 - DNA, 1398 bp, Artificial Sequence; identical to SEQ ID NO: 235
  Synthetic polymer

SEQ ID NO: 2660 - DNA, 1452 bp, Artificial Sequence; identical to SEQ ID NO: 1046
  Synthetic polymer

SEQ ID NO: 2661 - DNA, 1441 bp, Artificial Sequence; identical to SEQ ID NO: 1103
  Synthetic polymer

SEQ ID NO: 2662 - DNA, 1449 bp, Artificial Sequence; identical to SEQ ID NO: 1068
  Synthetic polymer

SEQ ID NO: 2663 - DNA, 1438 bp, Artificial Sequence
  Synthetic polymer
  misc_feature (616)..(616): n is a, c, g, or t
gatgaacgctagcgacgggcctaacacatgcaagtccaggggcagcggagaggtagcaatacctttgccggcgaccggcgcacgggtgagtaacacgtatgcaatccacctgtaacagggggataacccggagaaatccggactaataccccataatatgggcgctccgcatggagagcccattaaagagagcaattttggttacagacgatcatgcgctccattagccagttggcggggtaacggcccaccaaaacgacgatggataggggttctgagaggaaggtcccccacattgcaactgacacaccgtccacactcctacgggaggcagcagtgaggaatattggtcaatggtcggcagactgaaccagccaagtcgcgtgagggaagacggccctacgggttgtaaacctcttttgtcggagagtaaagtacgctacgtgtagcgtattgcaagtatccgaaaaaaaagcatcggctaactccgtgccagcagccgtggtaatacggaggatgcgagcgttatccggatttattgggtttaaagggtgcgtaggcggcacgccaagtcagcggtgaaatttccgggctcaacccggagtgtgccgttganactggcgagctagagtacacaagaggcaggcggaatgcgtggtgtagcggtgaaatgcatacatatcacgcagaaccccgattgcgaaggcagcctgctagggtgaaacagacgctgaggcacgtaagcgtgggtttcgcacaggatttagataccttggtagtcctcgcagtaatcgatgaaatattatctgtttgcgatacaatgtaagcggtacagcgaaagcgttaagtattccacctggggagtatgccggcaacggtgaaactcaaaggaattgacgggggcccgcacaagcggaggaacatgtggtttaattcgatgatacgcgaggagccttatcccgggctcaaacgcagggggaatatatatgaaagtatatagctagcaatagtcacttgcgaggtgctgcatggttgtcgtcagctcgtgccgtgaggtgtcggcttaagtgccataacgagcgcaacccctatggacagttactaacgggtgaagccgaggactctgtcgagactgccggcgcaagccgcgaggaaggtggggatgacgtcaaatcagcacggcccttacgtccggggtgacccacgcgttacaatggcaggtacatgaaggcagccagtcagcaatgacgcgcgaatcccgaaaacctgtttcagttcggattggagtttgcaacccgactccatgaaggtggattcgctagtaatcgcgcatcagccatggcgcggtgaatacgtttccgggccttgtacacaccgcccgtcaagccatggaagccgggagtacctaaagcatgcaaccgcaaggagcgtacgaagg

SEQ ID NO: 2664 - DNA, 1442 bp, Artificial Sequence; identical to SEQ ID NO: 1058
  Synthetic polymer

SEQ ID NO: 2665 - DNA, 1491 bp, Artificial Sequence
  Synthetic polymer
agagtttgatcctggctcaggatgaacgctagcgacaggcctaacacatgcaagtcgaggggcagcgcggaggtagcaatacttttggcggcgaccggcgcgcgggtgagtaacacgtatgcaatctgcctgtaacagggggataacccggagaaatccggcctaataccccataacgacgggagcccgcatgggcattcgtctaaagagagcaatcttggttacagatgagcatgcggtccattagccagttggcggggtaacggcccaccaaagcgacgatggataggggttctgagaggaaggtcccccacattggaactgagacacggtccaaactcctacgggaggcagcagtgaggaatattggtcaatggtcggcagactgaaccagccaagtcgcgtgaaggaagacggccctacgggttgtaaacttcttttgtcggagagtaaaggtcttcacgagtggagatttgcaagtatccgaagaaaaagcatcggctaactccgtgccagcagccgcggtaatacggaggatgcgagcgttatccggatttattgggtttaaagggtgcgtaggcggcacatcaagtcagcggtgaaatgcccgggcttaacccgggagctgccgttgaaactggcgagctagcgtgcacaagaggtaggcggaatgcgtggtgtagcggtgaaatgcatagatatcacgaagaaccccgattgcgaaggcagcctgctaagctgcaactgacgttgaggctcgaaagtgtgggtatcaaacaggattagataccctggtagtccacacggtaaacgatggatactcgctgttggcgatatacagtcagcggccaagtgaaaacgttaagtatcccacctggggagtacgccggcaacggtgaaactcaaaggaattgacgggggcccgcacaagcggaggaacatgtggtttaattcgatgatacgcgaggaaccttacccgggcttgaactgcacccgaatttaccggagacggtaaagccgcaaggcgggtgtggaggtgctgcatggttgtcgtcagctcgtgccgtgaggtgtcggcttaagtgccataacgagcgcaaccctttccgccggttactaacaggtcatgctgaggactccgacggtactgccatcgtaagatgtgaggaaggtggggatgacgtcaaatcagcacggcccttacgtccggggctacacacgtgttacaatggggggtacagaaggcagcgacctggcgacagggagcgaatcccgaaagcccctctcagttcggactggagtctgcaacccgactccacgaagctggattcgctagtaatcgcgcatcagccacggcgcggtgaatacgttcccgggccttgtacacaccgcccgtcaagccatgaaagccgggggtacctgaagtgcgtaaccgcgaggagcgccctagggtaaaaccggtaattggggctaagtcgtaacaaggtaacc

SEQ ID NO: 2666 - DNA, 1378 bp, Artificial Sequence; identical to SEQ ID NO: 896
  Synthetic polymer

SEQ ID NO: 2667 - DNA, 1445 bp, Artificial Sequence; identical to SEQ ID NO: 979
  Synthetic polymer

SEQ ID NO: 2668 - DNA, 1451 bp, Artificial Sequence; identical to SEQ ID NO: 1126
  Synthetic polymer

SEQ ID NO: 2669 - DNA, 1400 bp, Artificial Sequence; identical to SEQ ID NO: 429
  Synthetic polymer

SEQ ID NO: 2670 - DNA, 1404 bp, Artificial Sequence; identical to SEQ ID NO: 363
  Synthetic polymer

SEQ ID NO: 2671 - DNA, 1506 bp, Artificial Sequence; identical to SEQ ID NO: 522
  Synthetic polymer

SEQ ID NO: 2672 - DNA, 1384 bp, Artificial Sequence; identical to SEQ ID NO: 178
  Synthetic polymer

SEQ ID NO: 2673 - DNA, 1386 bp, Artificial Sequence; identical to SEQ ID NO: 384
  Synthetic polymer

SEQ ID NO: 2674 - DNA, 1375 bp, Artificial Sequence; identical to SEQ ID NO: 439
  Synthetic polymer

SEQ ID NO: 2675 - DNA, 1340 bp, Artificial Sequence
  Synthetic polymer
gacgaacgctggcggcgtgcctaacacatgcaagtcgaacgaagcatgaagagcttgcttttgatgcttagtggcggacgggtgagtaacgcgtgagcaacctgcctttcagagggggataacgtttggaaacgaacgctaataccgcataacatatttgaatcacatggtttgaatatcaaaggagcaatccactgaaagatgggctcgcgtccgattagctagttggtgagataacagcccaccaaggcgacgatcggtagccggactgagaggtcgaacggccacattgggactgagacacggcccagactcctacgggaggcagcagtgggggatattgcacaatggaggaaactctgatgcagcaacgccgcgtgagggaagaaggatttcggtttgtaaacctctgtcattggtgacgataatgacggtagccaatgaggaagctccggctaactacgtgccagcagccgcggtaatacgtagggagcgagcgttgtccggaattactgggtgtaaagggtgcgtaggcgggggaccaagtcaggtgtgaaaactatcggctcaaccgatagcctgcatttgaaactggttctcttgagtgaagtagaggcaggcggaattcccggtgtagcggtgaaatgcgtagagatcgggaggaacaccagtggcgaaggcggtctgctgggctttaactgacgctgaggcacgaaagcatgggtagcaaacaggattagataccctggtagtccatgctgtaaacgatgattactaggtgtgggtggtctgaccccatccgtgccggagttaacacaataagtaatccacctggggagtacggccgcaaggttgaaactcaaaggaattgacgggggcccgcacaagcagtggagtatgtggtttaattcgaagcaacgcgaagaaccttaccaggtcttgacatcccaagaaagcttaagagattaggctgtgcccttcggggaacttggagacaggtggtgcatggttgtcgtcagctcgtgtcgtgagatgttgggttaagtcccgcaacgagcgcaacccttgtcattagttgctacgcaagagcactctaatgagaccgccgttgacaaaacggaggaagatggggaggacgtcaaatcatcatgccccctatgacctgggccacacacgtactacaatggccgttaacagagggaagcaaagccgcgaggtggagcaaacccctaaaaacggtctcagttcggattgcaggctgaaactcgcctgtatgaagtcggaattgctagtaatcgcggatcagcatgccgcggtgaatacgttcccgggccttgtac

SEQ ID NO: 2676 - DNA, 1489 bp, Artificial Sequence; identical to SEQ ID NO: 70
  Synthetic polymer
  misc_feature (1333)..(1333): n is a, c, g, or t

SEQ ID NO: 2677 - DNA, 1353 bp, Artificial Sequence
  Synthetic polymer
agagtttgatcctggctcaggacgaacgctggcggcacgcctaacacatgcaagtcgagcgagaacttcggttctagcggcggacgggtgagtaacacgtgagcaacctgcctttcagagggggacaacagttggaaacgactgctaataccgcataatgtcatttggcggcatcgttgaatgaccaaaggagcaatccgctgaaagatgggctcgcgtccaattagatagttggtggggtaacggcctaccaagtcgacgattggtagccggactgagaggttgaacggccacattgggactgagatacggcccagactcctacgggaggcagcagtgggggatattgcacaatggaggaaactctgatgcagcgatgccgcgtgagggaagaaggttttcggattgtaaacctctgtggagcgggacgataatgacggtaccgctcaaggaagccacggctaactacgtgccagcagccgcggtaatacgtaggtggcgagcgttgtccggaattactgggtgtaaagggagtgtaggcgggaatgcaagtcagaagtgaaaactatgggctcaacccatagcctgcttttgaaactgtatttcttgagtgaagcagaggcaagcggaattcctagtgtagcggagaaatgcgtagatattaggaggaacaccagtggcgaaggcggcttgctgggcttttactgacgctgaggctcgaaagcgtggggagcaaacaggattagataccctggtagtccacgccgtaaacgatgattactaggtgtgggtagagaccctatccgtgccggagttaacacaataagtaatccacctggggagtacggccgcaaggctgaaactcaaaggaattgacgggggcccgcacaagcagtggagtatgtggtttaattcgaagcaacgcgaagaaccttaccaggtcttgacatcgagtgacgtatctagagatagatatttccttcgggacacgaagacaggtggtgcatggttgtcgtcagctcgtgtcgtgagatgttgggttaagtcccgcaacgagcgcaacccttactattagttgctacgcaagagcactctaataggactgccgttgacaaaacggaggaaggtggggatgacgtcaaatcatcatgccctttatgacctgggctacacacgtactacaatggtgtttaacaaagagaagcaaagccgcgaggcagagcaaatccccaaaaaacatctcagttcagattgcaggctgcaactcgcctgcatgaagtcggaattgctagtaatcgtaggtcagcatactacggtgaatacgttcccgggccttgcactcaccgccggtca

SEQ ID NO: 2678 - DNA, 1390 bp, Artificial Sequence; identical to SEQ ID NO: 564
  Synthetic polymer

SEQ ID NO: 2679 - DNA, 1340 bp, Artificial Sequence; identical to SEQ ID NO: 756
  Synthetic polymer

SEQ ID NO: 2680 - DNA, 1461 bp, Artificial Sequence; identical to SEQ ID NO: 500
  Synthetic polymer

SEQ ID NO: 2681 - DNA, 1389 bp, Artificial Sequence; identical to SEQ ID NO: 273
  Synthetic polymer

SEQ ID NO: 2682 - DNA, 1373 bp, Artificial Sequence
  Synthetic polymer
agagtttgatcctggctcaggacgaacgctggcggcacgcctaacacatgcaagtcgaacgaggttacattgaagcttgctttgaagtaacctagtggcggacgggtgagtaacacgtgaggaacctgccttacagagtgggataccgtctggaaacggacgttaataccgcataagatgacgaatccgcatgcttttgtcataaaagatttatcgctgtaagatggcctcgcgtctgattagatagttggtgaggtaacggcccaccaagtcgacgatcagtagccggactgagaggttgaacggccacattgggactgagacacggcccagactcctacgggaggcagcagtggggaatattgcacaatggaggaaactctgatgcagcgatgccgcgtgagggaagaaggttttaggattgtaaacctctgtcttcagggacgataatgacggtacctgaggaggaagctccggctaactacgtgccagcagccgcggtaatacgtagggagcgagcgttgtccggaattactgggtgtaaagggagtgtaggcgggactgcaagtcagatgtgaaaactatgggcttaacccatagactgcatttgaaactgtagttcttgagtgaagtagaggtaagcggaattcctagtgtagcggtgaaatgcgtagatattaggaggaacatcagtggcgaaggcggcttactgggcttttactgacgctgaggctcgaaagcgtggggagcaaacaggattagataccctggtagtccacgccgtaaacgatgattactaggtgtggggggattgaacccttccgtgccgcagttaacacaataagtaatccacctggggagtacgaccgcaaggttgaaactcaaaggaattgacgggggcccgcacaagcagtggagtatgtggattaattcgaagcaacgcgaagaaccttaccaggtcttgacatcgtacgcatagcatagagatatgtgaaatcccttcggggacgtatagacaggtggtgcatggttgccgtcagctcgtgtcgtgagatgttgggttaagtcccgcaacgagcgcaacccttactgttagttgctacgcaagagcactctagcaggactgccgttgacaaaacggaggaaggcggggacgacgtcaaatcatcatgccccttatgtcctgggctacacacgtaatacaatggtggttaacagagggaagcaaagcagcgatgtggagcaaatccctaaaagccatctcagttcggattgcaggctgcaactcgcctgcatgaagctggaattgctagtaatcgcggatcagcatgccgcggtgaatacgttcccgggccttgacacaacgcccgtca

SEQ ID NO: 2683 - DNA, 1333 bp, Artificial Sequence
  Synthetic polymer
gacgaacgctggcggcgtgcctaacacatgcaagtcgaacggggcgaagggagcttgctcctggagcctagtggcggacgggtgagtaacgcgcgagtaacctgcctttcagagggggataacattctgaaaaggatgctaataccgcatgacctcttttcatcgcatggtgggaagagcaaaggagcaatccgctgaaagatggactcgcgtccgattagctagttggcggggtaaaggcccaccaaggcgacgatcggtagccggactgagaggttgaacggccacattgggactgagacacggcccagactcctacgggaggcagcagtgggggatattgcacaatggggggaaccctgatgcagcaacgccgcgtgagtgacgaaggtcttcggattgtaaaactctgttcttggtgaagataatgacggtagccaaggagaaagctccggctaactacgtgccagcagccgcggtaatacgtagggagcgagcgttgtccggaattactgggtgtaaagggtgcgtaggcggccttgcaagtcaggcgtgaaaaccatgggctcaacccgtggactgcgtttgaaactgtgagacttgagtgaagtagaggtaggcggaattcccggtgtagcggtgaaatgcgtagagatcgggaggaacaccagtggcgaaggcggcctactgggctttaactgacgctgaggcacgaaagcatgggtagcaaacaggattagataccctggtagtccatgccgtaaacgatgattactaggtgtggggggtctgaccccctccgtgccggagttaacacaataagtaatccacctggggagtacggccgcaaggttgaaactcaaaggaattgacgggggcccgcacaagcagtggagtatgtggtttaattcgaagcaacgcgaagaaccttaccaggtcttgacatccctctgaccgccctagagatagggtttcccttcggggcaggggtgacaggtggtgcatggttgtcgtcagctcgtgtcgtgagatgttgggttaagtcccgcaacgagcgcaacccttgtcattagttgctacgcaagagcactctaatgagactgccgttgacaaaacggaggaaggtggggacgacgtcaaatcatcatgccccttatgacctgggctacacacgtactacaatggccgtaaacagagagaagcaatgtcgcgaggcggagccaaactccaaaaacggtcccagttcggattgcaggctgaaactcgcctgcatgaagttggaattgctagtaatcgcggatcagcatgccgcggtgaatacgttcccgggcct

SEQ ID NO: 2684 - DNA, 1375 bp, Artificial Sequence; identical to SEQ ID NO: 287
  Synthetic polymer

SEQ ID NO: 2685 - DNA, 1427 bp, Artificial Sequence; identical to SEQ ID NO: 1032
  Synthetic polymer

SEQ ID NO: 2686 - DNA, 1467 bp, Artificial Sequence; identical to SEQ ID NO: 543
  Synthetic polymer

SEQ ID NO: 2687 - DNA, 1442 bp, Artificial Sequence; identical to SEQ ID NO: 1047
  Synthetic polymer

SEQ ID NO: 2688 - DNA, 1359 bp, Artificial Sequence
  Synthetic polymer
gctcaggacgaacgctggtcggcgtgcctaacacatgccagtctaacggggctagaggagcttgctcctccacacctagtggcggacgggtgagtaacgcgtgagtaacctgcctttcagaggggaataacgttctgaaaagaacgctaataccgcataacgtgcagctttcgcatggaagcagtaccaaaggagcaatccgctgagagatggactcgcgtccgattagctagttggtggggtaaaggcctaccaaggcgacgatcggtagccggactgagaggttgaacggccacattgggactgagacacggcccagactcctacgggaggcagcagtgggggatattgcacaatgggggaaaccctgatgcagcaacgccgcgtgtgggaagaaggttttcggattgtaaaccactgttcttggtgaagataatgacggtaaccaaggagaaagctccggctaactacgtgccagcagccgcggtaatacgtagggagcaagcgttgtccggatttactgggtgtaaagggtgcgtaggcggtcttgcaagtcagacgtgaaaaccacaggctcaacctgtggactgcgtttgaaactgtggggcttgagtgaagtagaggtaggcggaattcccggtgtagcggtgaaatgcgtagagatcgggaggaacaccagtggcgaaggcggcctactgggctttaactgacgctgaggcacgaaagcatgggtagcaaacaggattagataccctggtagtccatgccgtaaacgatgattactaggtgtggggggtctgaccccctccgtgccggagttaacacaataagtaatccacctggggagtacggccgcaaggttgaaactcaaaggaattgacgggggcccgcacaagcagtggagtatgtggtttaattcgaagcaacgcgaagaaccttaccaggtcttgacatccccttgaccgccctagagatagggcttcccttcggggcaagggtgacaggtggtgcatggttgtcgtcagctcgtgtcgtgagatgttgggttaagtcccgcaacgagcgcaacccttgtcattagttgctacgcaagagcactctaatgagactgccgttgacaaaacggaggaaggtggggacgacgtcaaatcatcatgccccttatggcctgggctacacacgtgctacaatggcgtaaacaaagggaagcgaaggcgtgagcgtaagcaaaacccaaaaataacgtcccagttcggattgcaggctgaaactcgcctgcatgaagttggaattgctagtaatcgcggatcagcatgccgcggtgaatacgttcccgggccttgcacacaccgcccgtca

SEQ ID NO: 2689 - DNA, 1478 bp, Artificial Sequence; identical to SEQ ID NO: 475
  Synthetic polymer

SEQ ID NO: 2690 - DNA, 1484 bp, Artificial Sequence; identical to SEQ ID NO: 504
  Synthetic polymer

SEQ ID NO: 2691 - DNA, 1395 bp, Artificial Sequence; identical to SEQ ID NO: 537
  Synthetic polymer

SEQ ID NO: 2692 - DNA, 1384 bp, Artificial Sequence; identical to SEQ ID NO: 694
  Synthetic polymer

SEQ ID NO: 2693 - DNA, 1358 bp, Artificial Sequence; identical to SEQ ID NO: 794
  Synthetic polymer

SEQ ID NO: 2694 - DNA, 1348 bp, Artificial Sequence
  Synthetic polymer
gacgggtgagtaacacgtgggtaacctgccttaatgagggggatagccttccgaaaggaagattaataccgcataacattgagttttcgcatgaagattcaatcaaagatttatcgcattaagatggacccgcggcgcattagctagttggtgaggtaacggctcaccaaggccacgatgcgtagccgacctgagagggtgatcggccacattgggactgagacacggcccagactcctacgggaggcagcagtggggaatattgcacaatgggggaaactctgatgcagcaacgccgcgtgagggaagaaggtcttcggattgtaaacctttgtccttggtgaagagaaaaatgacggtagccaaggaggaagctccggctaactacgtgccagcagccgcggtaatacgtagggggcgagcgttgtccggatttactgggtgtaaagggtgcgtaggcggctctgcaagtcaggcgtgaaaaccatgggcttaactcatggactgcgtttgaaactgtggggcttgagtgaagtagaggtaggcggaattcccggtgtagcggtgaaatgcgtagagatcgggaggaacaccagtggcgaaggcggcctactgggctttaactgacgctgaggcacgaaagcatgggtagcaaacaggattagataccctggtagtccatgccctaaacgatgattactaggtgtgtggggtctgaccccctccgtgccggagttaacacaataagtaatccacctggggagtacggccgcaaggttgaaactcaaaggaattgacgggggcccgcacaagcagtggagtatgtggtttaattcgaagcaacgcgaagaaccttaccaggtcttgacatccaactaacgaggcagagatgcgtcaggtgcccttcggggaaagttgagacaggtggtgcatggttgtcgtcagctcgtgtcgtgagatgttgggttaagtcccgcaacgagcgcaacccttgtgattagttgctacgcaagagcactctaatcagactgccgttgacaaaacggaggaaggtggggacgacgtcaaatcatcatgccctttatgacctgggccacacacgtactacaatggccgttaacagagggaagcaagaccgcgaggtggagcaaaaccctaaaaacggtcccagttcggattgcaggctgcaactcgcctgcatgaagttggaattgctagtaatcgcggatcagcatgccgcggtgaatacgttcccgggccttgtacacaccgcccgtcacaccatgggagccggtaatacccgaagtcagtagtctaaccgcaagggggacgctgccgaaggtaggat

SEQ ID NO: 2695 - DNA, 1373 bp, Artificial Sequence
  Synthetic polymer
agagtttgatcctggctcaggacgaacgctggcggcgtgcctaacacatgcaagtcgaacggggttaggggagcctagcttcccgaagcctagtggcggacgggtgagtaacgcgtgagtaacctgcctttcagaggggaataacgttctgaaaagaacgctaataccgcataacgtgcaattgtcgcatgacagaagtaccaaaggagcaatccgctgagagatggactcgcgtccgattagctagttggtggggtaaaggcctaccaaggcgacgatcggtagccggactgagaggttgaacggccacattgggactgagacacggcccagactcctacgggaggcagcagtgggggatattgcacaatgggggaaaccctgatgcagcaacgccgcgtgtgggaagaaggttttcggattgtaaaccactgttcttggtgaagataatgacggtagccaaggagaaagctccggctaactacgtgccagcagccgcggtaatacgtagggagcgagcgttgtccggatttactgggtgtaaagggtgcgtaggcggccttgcaagtcagacgtgaaaaccacaggctcaaccagtggactgcgtttgaaactgtagggcttgagtgaagtagaggcaggcggaattcccggtgtagcggtgaaatgcgtagagatcgggaggaacaccagtggcgaaggcggcctgctgggctttaactgacgctgaggcacgaaagcatgggtagcaaacaggattagataccctggtagtccatgccgtaaacgatgattactaggtgtggggggtctgaccccctccgtgccggagttaacacaataagtaatccacctggggagtacggccgcaaggctgaaactcaaaggaattgacgggggcccgcacaagcagtggagtatgtggtttaattcgaagcaacgcgaagaaccttaccaggtcttgacatccctctgaccgccctagagatagggtttcccttcggggcaggggtgacaggtggtgcatggttgtcgtcagctcgtgtcgtgagatgttgggttaagtcccgcaacgagcgcaacccttgtcattagttgctacgcaagagcactctaatgagactgccgttgacaaaacggaggaaggtggggacgacgtcaaatcatcatgccccttatgacctgggctacacacgtactacaatggccgtgaacagagggatgcaataccgcgaggtggagccaaaccctaaaaacggtcccagttcggattgcaggctgaaactcgcctgcatgaagttggaattgctagtaatcgcggatcagcatgccgcggtgaatacgttcccgggccttgtacacaccgcccgtca

SEQ ID NO: 2696 - DNA, 1424 bp, Artificial Sequence; identical to SEQ ID NO: 971
  Synthetic polymer

SEQ ID NO: 2697 - DNA, 1392 bp, Artificial Sequence; identical to SEQ ID NO: 300
  Synthetic polymer

SEQ ID NO: 2698 - DNA, 1342 bp, Artificial Sequence; identical to SEQ ID NO: 760
  Synthetic polymer

SEQ ID NO: 2699 - DNA, 1402 bp, Artificial Sequence; identical to SEQ ID NO: 191
  Synthetic polymer

SEQ ID NO: 2700 - DNA, 1347 bp, Artificial Sequence; identical to SEQ ID NO: 762
  Synthetic polymer

SEQ ID NO: 2701 - DNA, 1395 bp, Artificial Sequence
  Synthetic polymer
ttcgcccttagagtttgatcctggctcaggatgaacgctggcggcgtgcctaacacatgcaagtcgaacggaacttctttgacagaattctacggaaggaagttgattaagtttagtggcggacgggtgagtaacgcgtgagtaacctgcctttgagaggggaataacttcccgaaagggatgctaataccgcatgacgcatatttatcgcatggtagatatgccaaagatttatcgctcaaagatggactcgcgtccgattagccagttggcggggtaacggcccaccaaagcgacgatcggtagccggactgagaggttgaacggccacattgggactgagacacggcccagactcctacgggaggcagcagtgggggatattgcgcaatgggggaaaccctgacgcagcaacgccgcgtgaaggatgaaggttttcggattgtaaacttcttttatttaggacgaagaatgacggtactaaatgaataagctccggctaactacgtgccagcagccgcggtaatacgtagggagcaagcgttatccggatttactgggtgtaaagggtgcgtaggcggcttggtaagtcagatgtgaaatgtatgggctcaacccatgcactgcatttgaaactattgagcttgagtgaagtagaggtaggcggaattccctgtgtagcggtgaaatgcgtagagatagggaggaacaccagtggcgaaggcggcctactgggctttaactgacgctgaggcacgaaagcgtgggtagcaaacagaattagataccctggtagtccacgctgtaaacgatgatatactaggtgtggggggtctgaccccttccgtgccggagttaacacaataagtaatccacgtggggagtacgtccgcaaggttgaaactcaaaggaattgacgggggcccgcacaagcagtggagtatgtggtttaattcgaagcaacgcgaagaaccttgccaggtcttgacatcgagtgacgaatctagagatagatttttccttcgggacacaaagacaggtggtgcatggttgtcgtcagctcgtgtcgtgagatgttgggttaagtcccgcaacgagcgcaacccttgttattagttgctacgcaagagcactctaataggactgccgttgacaaaacggaggaaggtggggacgacgtcaaatcatcatgccccttatgacctgggctacacacgtgctacaatggcgtaaacaaagggaagcgagcctgcgagggtaagcaaatctcaaaaataacgtctcagttcggattgtagtctgcaactcgactacatgaagctggaatcgctagtaatcgcgaatcagcatgtcgcggtgaatacgttcctcgggtcttgcactcaccgcccgtca

SEQ ID NO: 2702 - DNA, 1331 bp, Artificial Sequence; identical to SEQ ID NO: 55
  Synthetic polymer

SEQ ID NO: 2703 - DNA, 1509 bp, Artificial Sequence; identical to SEQ ID NO: 860
  Synthetic polymer

SEQ ID NO: 2704 - DNA, 1369 bp, Artificial Sequence; identical to SEQ ID NO: 177
  Synthetic polymer

SEQ ID NO: 2705 - DNA, 1387 bp, Artificial Sequence
  Synthetic polymer
agagtttgatcctggctcaggatgaattctggcggcgtgcttaacacatgcaagtcgaacgaagcatttacacggaatccctcgggaggaagtgtgaatgactgagtggcggacgggtgagtaacgcgtgggcaacctgccccgtaccgggggataacagccggaaacggctgctaataccgcatatgctttgcgggccctgtgtgggacaaagtgaaaaactccggtggcgcaagagggacccgcctctgattagctggtgggcggggtaaaggcccaccaaggcgactatcagtagccggcctgagagggtggacggccacattgagactgagacacggcccagactcctacgggaggtagcagtggggaatattggacaatggggggaaaccctgatccagcgacgccgcgtgagggaagaaggttttcggattgtaaacctctgtcagtggggacgataatgacggtacccacggaggaagccacggctaactacgtgccagcagccgcggtaatacgtaggtggcaagcgttgtccggaattactgggtgtaaagggagcgtaggcgggatgtcaagtcagaagtgaaaattatgggctcaactcataacctgcttttgaaactgatattcttgagtgaagtagaggcaagcggaattcctagtgtagcggtgaaatgcgtagatattaggaggaacaccagtggcgaaggcggcttgctgggcttttactgacgctgaggctcgaaagcgtggggagcaaacaggattagataccctggtagtccatgctgtaaacgatgattactaggtgtgggggggttgaacccttccgtgccggagttaacacaataagtaatccacctggggagtacgaccgcaaggttgaaactcaaaggaattgacgggggcccgcacaagcagtggagtatgtggattaattcgatgcaacgcgaagaaccttaccaggtcttgacatcaagtgcaagtcccagagatgggatcctctcttcggagacacgaagacaggtggtgcatggttgtcgtcagctcgtgtcgtgagatgttgggttaagtcccgcaacgagcgcaacccttatgattagttgctacgcaagagcactctgatcagactgccgttgacaaaacggaggaaggtggggatgaggtcaaatcatcatgccccttacgacctgggcctcacacgtactacaatggcgtttaacaaagagcagcaaaaccgcgaggtggagcaaatctccaaaaaacgtctcagttcggattgtaggctgcaacccgcctgcatgaagtcggaattgctagtaatcgtagatcagcatgctacggtgaatacgttcccgggccttgcacacaccgcccgtca

SEQ ID NO: 2706 - DNA, 1431 bp, Artificial Sequence
  Synthetic polymer
ggcggcgtgcctaacacatgcaagtcgaacggggctaggaaagcttgctttctgatgcctagtggcggacgggtgagtaacgcgtgagtaacctgcctttcagaggggaataacgttctgaaaagaacgctaataccgcataacgtacagctttcgcatggaagcagtaccaaaggagcaatccgctgagagatggactcgtgtccgattagctagttggtggggtaaaggcctaccaaggcgacgatcggtagccggactgagaggttgaacggccacattgggactgagacacggcccagactcctacgggaggcagcagtgggggatattgcacaatgggggaaaccctgatgcagcaacgccgcgtgtgggaagaaggttttcggattgtaaaccactgttcttggtgaagataatgacggtaaccaaggagaaagctccggctaactacgtgccagcagccgcggtaatacgtagggagcaagcgttgtccggatttactgggtgtaaagggtgcgtaggcggctaggcaagtcagacgtgaaaaccatgggctcaacctgtggactgcgtttgaaactgtttagcttgagtgaagtagaggtaggcggaattcccggtgtagcggtgaaatgcgtagagatcgggaggaacaccagtggcgaaggcggcctactgggctttaactgacgctgaggcacgaaagcatgggtagcaaacaggattagataccctggtagtccatgccgtaaacgatgattactaggtgtggggggtctgaccccctccgtgcccgagttaacacaataagtaatcccccctggggagtaggccggaaaggtgaaaattcaaaggaattgcgggggccccgcacaagcatgggatatgttgttttatttgaagcaacgcgaagacctttaccaggtctgacattccgactaaggaagtagagatacattaggtggcccttgggggaaagtcgagacaggtggtgcatggttgtcgtcagctcgtgtcgtgagatgttgggttaagtcccgcaacgagcgcaacccttgtcattagttgctacggtaatgagcactctaatgagactgccgttgacaaaacggaggaaggtggggacgacgtcaaatcatcatgccccttatgacctgggctacacacgtactacaatggccgttaacagagggaagcaataccgcgaggtggagccaaaccctaaaaacggtcccagttcggattgcaggctgaaactcgcctgcatgaagttggaattgctagtaatcgcggatcagcatgccgcggtgaatacgttcccgggccttgtacacaccgcccgtcacaccatgggagccggtaatacccgaagccagtagtctaaccgcaaggaggacgctgtcgaaggtaggattggcgactggggtg

SEQ ID NO: 2707 - DNA, 1401 bp, Artificial Sequence; identical to SEQ ID NO: 153
  Synthetic polymer

SEQ ID NO: 2708 - DNA, 1377 bp, Artificial Sequence
  Synthetic polymer
  misc_feature (619)..(619): n is a, c, g, or t
agagtttgatcctggctcaggatgaacgctggcggcatgcctaacacatgcaagtcgaacggagattacgaaagcttgcttttgtaatcttagtggcggacgggtgagtaacgcgtgagtaacctgcctctcagagggggataacgttctgaaaagaacgctaataccgcatataatcacgaaaccgcatggttttgtgatgaaaggagcaatccgctgagagatggactcgcgtctgattagctagatggtggggtaacggcttaccatggcgacgatcagtagccggactgagaggttgaacggccacattgggactgagacacggcccagactcctacgggaggcagcagtgggggatattgcgcaatgggggaaaccctgacgcagcaatgccgcgtgaaggatgaaggttttcggattgtaaacttcttttgttaaggacgaagaatgacggtacttaacgaataagctccggctaactatgtgccagcagccgcggtaatacatagggagcaagcgttatccggatttactgggtgtaaagggtgcgtaggcggctaagcaagtcagatgtgaaatacacgggctcaactcgtgggctgcatttgaaactgtntagcttgagtgaagtagaggcaggcggaattcccggtgtagcggtgaaatgcgtagagatcgggaggaacaccagtggcgaaggcggcctgctgggcttttactgacgctgaggcacgaaagcgtgggtagcacacaggattagataccctggtagtccacgctgtaaacgatgattactaggtgtgggtgggctgaccccatccgtgccgcagttaacacaataagtaatccacctggggagtacgaccgcaaggttgaaactcaaaggaattgacgggggcccgcacaagcagtggagtatgtggtttaattcgaagcaacgcgaagaaccttaccaggtcttgacatccaactaacgaagtagagatacattaggtgcccttcggggaaagttgagacaggtggtgcatggttgtcgtcagctcgtgtcgtgagatgttgggttaagtcccgcaacgagcgcaacccttgctattagttgctacgcaagagcactctaataggactgccgttgacaaaacggaggaaggtggggacgacgtcaaatcatcatgccccttatgacctgggctacacacgtactacaatggccattaacaaagggaagcaaaaccgcgaggtggagcaaacccccaaaaatggtcccagttcggattgtaggctgcaacccgcctatatgaagttggaattgctagtaatcgtggatcagaatgccacggtgaatacgttcaccgggccttgtacacagcgcccgtc

SEQ ID NO: 2709 - DNA, 1391 bp, Artificial Sequence; identical to SEQ ID NO: 819
  Synthetic polymer

SEQ ID NO: 2710 - DNA, 1382 bp, Artificial Sequence
  Synthetic polymer
ttcgcccttagagtttgatcctggctcaggacgaacgctggcggcacgcttaacacatgcaagtcgaacgagagaagagaagcttgcttttctgatctagtggcggacgggtgagtaacacgtgagcaatctgcctttcagggggggataccgattggaaacgatcgttaataccgcataacataattgaaccgcatgatttgattatcaaagatttatcgctgaaagatgagctcgcgtctgattagctagttggtaaggtaacggcttaccaaggcgacgatcagtggccggactgagaggttgatcggccacattgggactgagacacggcccagactcctacgggaggcagcagtggggaatattgcacaatggaggaaactctgatgcagcgatgccgcgtgagggaagaaggttttaggattgtaaacctctgtctttggggacgaaaaatgacggtacccaaggaggaagctccggctaactacgtgccagcagccgcggtaatacgtagggagcgagcgttgtccggaattactgggtgtaaagggagcgtaggcgggatcgcaagtcagatgtgaaaactatgggcttaacccataaactgcatttgaaactgtggttcttgagtgaagtagaggtaagcggaattcctagtgtagcggtgaaatgcgtagatattaggaggaacatcagtggcgaaggcggcttactgggctttaactgaggctgaggctcgaaagcgtggggagcaaacaggattagataccctggtagtccacgccgtaaacgatgattactaggtgtggggggactgacccctttccgtgccgcagcaaacgcaataagtaatccacctggggagtacgaccgcaaggttgaaactcaaaggaattgacgggggcccgcacaagcagtggagtatgtggattaattcgaagcaacgcgaagaaccttaccaggtcttgacatcgtatgcatagctcagagatgagtgaaatctcttcggagacatatagacaggtggtgcatggttgtcgtcagctcgtgtcgtgagatgttgggttaagtcccgcaacgagcgcaacccttactgttagttgctacgcaagagcactctagcaggactgccgttgacaaaacggaggaaggtggggatgacgtcaaatcatcatgccccttatgacctgggctacacacgtactacaatggcaatataacagagggaagcaatacagcgatgtggagcaaatccccaaaaattgtcccagttcagattgcaggctgcaactcgcctgcatgaagtcggaattgctagtaatcgcagatcagcatgctgcggtgaatacgttcccgggccttgcacacaccgcccgtca

SEQ ID NO: 2711 - DNA, 1394 bp, Artificial Sequence; identical to SEQ ID NO: 365
  Synthetic polymer

SEQ ID NO: 2712 - DNA, 1335 bp, Artificial Sequence; identical to SEQ ID NO: 1018
  Synthetic polymer

SEQ ID NO: 2713 - DNA, 1399 bp, Artificial Sequence; identical to SEQ ID NO: 499
  Synthetic polymer

SEQ ID NO: 2714 - DNA, 1436 bp, Artificial Sequence; identical to SEQ ID NO: 909
  Synthetic polymer

SEQ ID NO: 2715 - DNA, 1361 bp, Artificial Sequence; identical to SEQ ID NO: 795
  Synthetic polymer

SEQ ID NO: 2716 - DNA, 1478 bp, Artificial Sequence; identical to SEQ ID NO: 33
  Synthetic polymer

SEQ ID NO: 2717 - DNA, 1315 bp, Artificial Sequence; identical to SEQ ID NO: 880
  Synthetic polymer

SEQ ID NO: 2718 - DNA, 1444 bp, Artificial Sequence; identical to SEQ ID NO: 1090
  Synthetic polymer

SEQ ID NO: 2719 - DNA, 1399 bp, Artificial Sequence; identical to SEQ ID NO: 730
  Synthetic polymer

SEQ ID NO: 2720 - DNA, 1384 bp, Artificial Sequence
  Synthetic polymer
ttcgcccttagagtttgatcctggctcaggacgaacgctggcggcgtgcctaacacatgcaagtcgaacggacgagagggagcttgctccctcaagttagtggcggacgggtgagtaacgcgtgagtaacctgcctttcagaggggaataacattctgaaaaggatgctaataccgcatgacatcgtagtatcgcatggtacagcgatcaaaggagcaatccgctgaaagatggactcgcgtccgattagctagttggcgggataaaggcccaccaaggcgacgatcggtagccggactgagaggttgatcggccacattgggactgagacacggcccagactcctacgggaggcagcagtgggggatattgcacaatgggggaaaccctgatgcagcaacgccgcgtgaaggaagaaggtcttcggattgtaaacttctgtcctcagggaagataatgacggtacctgaggaggaagctccggctaactacgtgccagcagccgcggtaatacgtagggagcgagcgttgtccggatttactgggtgtaaagggtgcgtaggcggatctgcaagtcagtagtgaaatcccagggcttaaccctggaactgctattgaaactgtgggtcttgagtgaggtagaggcaggcggaattcccggtgtagcggtgaaatgcgtagagatcgggaggaacaccagtggcgaaggcggcctgctgggccttaactgacgctgaggcacgaaagcatgggtagcaaaacaggattagataccctggtagtccatgccgtaaacgatgattactaggtgtgggtggtctgaccccatccgtgccggagttaacacaataagtaatccacctggggagtacggccgcaaggttgaaactcaaaggaattgacgggggcccgcacaagcagtggagtatgtggtttaattcgatgatacgcgaggaaccttacccgggcttaaattgcagcggaatgtagtggaaacattacagccttcgggccgctgtgaaggtgctgcatggttgtcgtcagctcgtgccgtgaggtgtcggcttaagtgccataacgagcgcaacccttatctatagttactatcaggtcatgctgaggactctatggagactgccgtcgtaagatgtgaggaaggtggggatgacgtcaaatcagcacggcccttacgtccggggctacacacgtgctacaatgatcggtacaataagacgcaagcccgcgagggggagcaaaactggaaaaccgatctcagttcggattgtaggctgaaactcgcctacatgaagctggagttgctagtaatcgcgaatcagcatgtcgcggtgaatacgttcccgggccttgcacacaccgcccgtca

SEQ ID NO: 2721 - DNA, 1466 bp, Artificial Sequence; identical to SEQ ID NO: 558
  Synthetic polymer

SEQ ID NO: 2722 - DNA, 1483 bp, Artificial Sequence; identical to SEQ ID NO: 802
  Synthetic polymer

SEQ ID NO: 2723 - DNA, 1495 bp, Artificial Sequence
  Synthetic polymer
agagtttgatcctggctcaggacgaacgctggcggcgtgcctaatacatgcaagtcgaacggagatatacgcggaagatttagcttgctattgattcttgtatatcttagtggcggacgggtgagtaacgcgtgagcaacctgcctttcagagggggataacgtttggaaacgaacgctaataccgcatgatattatcttatcgcatgataggatgatcaaaggagtgatccgctgaaagatgggctcgcgtccgattaggtagttggtgaggtaacggcccaccaagccgacgatcggtagccggactgagaggttggacggccacattgggactgagacacggcccagactcctacgggaggcagcagtaagggatattggtcaatgggggaaaccctgaaccagcaacgccgcgtgagggaagacggttttcggattgtaaacctctgtcctctgtgaagatgatgacggtagcagaggaggaagctccggctaactacgtgccagcagccgcggtaatacgtagggagcgagcgttgtccggatttactgggtgtaaagggtgcgtaggcggctatgcaagtcagtagtgaaatccatgggcttaacccatgaactgctattgaaactgcacagcttgagtgaagtagaggtaggcggaattcccggtgtagcggtgaaatgcgtagagatcgggaggaacaccagtggcgaaggcggcctactgggctttaactgacgctgaggcacgaaagcgtgggtagcaaacaggattagataccctggtagtccacgctgtaaacgatgattactaggtgtggggggactgaacccttccgtgccggagttaacacaataagtaatccacctggggagtacggccgcaaggctgaaactcaaaggaattgacgggggcccgcacaagcagtggagtatgtggattaattcgatgcaacgcgaagaaccttaccaggtcttgacatcccgctaacgagacagagatgcgttaggtgcccttcggggaaagcggagacaggtggtgcatggttgtcgtcagctcgtgtcgtgagatgttgggttaagtcccgcaacgagcgcaacccttactgttagttgctacgcaagagcactctagcaggaccgccgttgacaaaacggaggaaggtggggatgatgtcaaatcatcatgccccttatgacctgggcctcacacgtactacaatggccataaacagagggaggcaaagccgcgaggcagagcaaaaccctaaaaatggtcccagttcggatcgcaggctgcaacccgcctgcgtgaagttggaattgctagtaatcgcggatcagcatgccgcggtgaatacgttcccgggccttgtacacaccgcccgtcacaccatgggagccggtaatgcccgaagtcagtagcctaaccgcaaggggggcgctgccgaaggtaggattggcgactggggtgaagtcgtaacaaggtaacc

SEQ ID NO: 2724 - DNA, 1391 bp, Artificial Sequence; identical to SEQ ID NO: 144
  Synthetic polymer

SEQ ID NO: 2725 - DNA, 1383 bp, Artificial Sequence; identical to SEQ ID NO: 581
  Synthetic polymer
  misc_feature (426)..(426): n is a, c, g, or t

SEQ ID NO: 2726 - DNA, 1469 bp, Artificial Sequence
  Synthetic polymer
acgaacgctggcggcgtgcctaacacatgcaagtcgaacggagttattttgacagatcccttcggggtgatagatttataacttagtggcggacgggtgagtaacgcgtgagtaacctgcctctgagaggggaataacgttctgaaaagatcgctaataccgcataacatacagctgtcgcatggcagaagtatcaaagattttatcgctcagagatggactcgcgtccgattagctagttggcggggtaacggcccaccaaggcgacgatcggtagccggactgagaggttgatcggccacattgggactgagacacggcccagactcctacgggaggcagcagtgggggatattgcgcaatgggggcaaccctgacgcagcaacgccgcgtgaaggaagacggttttcggattgtaaacttcttttgtcagggacgaattctgacggtacctgacgaataagctccggctaactacgtgccagcagccgcggtaatacgtagggagcaagcgttgtccggatttactgggtgtaaagggtgcgtaggcggctttgtaagtcagatgtgaaatctatgggctcaacccataaactgcatttgaaactataaagcttgagtgaagtagaggcaggcggaattccctgtgtagcggtgaaatgcgtagagatagggaggaacaccagtggcgaaggcggcctgctgggctttaactgacgctgaggcacgaaagcgtgggtagcaaacaggattagataccctggtagtccacgctgtaaacgatgattactaggtgtggggggactgaccccttccgtgccggagttaacacaataagtaatccacctggggagtacggccgcaaggttgaaactcaaaggaattgacgggggcccgcacaagcagtggagtatgtggtttaattcgaagcaacgcgaagaaccttaccaggtcttgacatccaactaacgaagtagagatacattaggtgcccttcggggaaagttgagacaggtggtgcatggttgtcgtcagctcgtgtcgtgagatgttgggttaagtcccgcaacgagcgcaacccttgctattagttgctacgcaagagcactctaataggactgccgttgacaaaacggaggaaggtggggacgacgtcaaatcatcatgccccttatgacctgggctacacacgtactacaatggccgttaacagagggaagcaatatggcgacatggagcaaacccccaaaaacggtctcagttcagattgcaggctgcaacccgcctgcatgaagtcggaattgctagtaatcgcgaatcagcatgtcgcggtgaatacgttcccgggccttgtacacaccgcccgtcacaccatgggagccggtaatacccgaagtcagtagcctaacgcaagagggcgctgccgaaggtaggattggcgactggggtgaagtcgtaacaaggtaacc

SEQ ID NO: 2727 - DNA, 1467 bp, Artificial Sequence
  Synthetic polymer
gcggcgtgcctaacacatgcaagtcgaacggagatcgagtttaacaccgaggacttgagaaagacatcgagtgttcggtgttgaacttgatcttagtggcggacgggtgagtaacgcgtgagtaacctgcctttcagagggggataacgttttgaaaagaacgctaataccgcatgatatccttgcttcgcatggagtggggatcaaaggagcaatccgctgaaagatggactcgcgtccgattagccagttggcggggtaacggcccaccaaagcgacgatcggtagccggactgagaggttgaacggccacattgggactgagacacggcccagactcctacgggaggcagcagtgggggatattgcacaatgggggaaaccctgatgcagcaacgccgcgtgaaggaagaaggtcttcggattgtaaacttttgtccttagtgaagataatgacggtagctaaggaggaagctccggctagctacgtgccagcagccgcggtaatacgtagggagcgagcgttgtccggatttactgggtgtaaagggtgcgtaggcggaagagcaagtcagtagtgaaatccatgggcttaacccgtgaactgctattgaaactgtttttcttgagtgaagtagaggtaggcggaattcccggtgtagcggtgaaatgcgtagagatcgggaggaacaccagtggcgaaggcggcctactgggctttaactgacgctgaggcacgaaagcatgggtagcaaacaggattagataccctggtagtccatgctgtaaacgatgattactaggtgtgggaggactgaccccttccgtgccgcagttaacacaataagtaatccacctggggagtacggccgcaaggttgaaactcaaaggaattgacgggggcccgcacaagcagtggagtatgtggtttaattcgaagcaacgcgaagaaccttaccaggtcttgacatccaactaacgagatagagatatgttaggtgcccttcggggaaagttgagacaggtggtgcatggttgtcgtcagctcgtgtcgtgagatgttgggttaagtcccgcaacgagcgcaacccttgtgattagttgctacgcaagagcactctaatcagactgccgttgacaaaacggaggaaggtggggacgacgtcaaatcatcatgccctttatgacctgggctacacacgtactacaatggccgtaaacagagggaagcaagaccgcgaggtggagcaaaaccctaaaaacggtcccagttcggattgcaggctgcaacccgcctgcatgaagttggaattgctagtaatcgcggatcagcatgccgcggtgaatacgttcccgggccttgtacacaccgcccgtcacaccatgggagccggtaatacccgaagtcagtagcttaaccgcaaggagggcgctgccgaaggtaggattggcgactggggtgaagtc

SEQ ID NO: 2728 - DNA, 1370 bp, Artificial Sequence; identical to SEQ ID NO: 269
  Synthetic polymer

SEQ ID NO: 2729 - DNA, 1378 bp, Artificial Sequence; identical to SEQ ID NO: 737
  Synthetic polymer

SEQ ID NO: 2730 - DNA, 1364 bp, Artificial Sequence; identical to SEQ ID NO: 711
  Synthetic polymer

SEQ ID NO: 2731 - DNA, 1365 bp, Artificial Sequence; identical to SEQ ID NO: 277
  Synthetic polymer

SEQ ID NO: 2732 - DNA, 1450 bp, Artificial Sequence; identical to SEQ ID NO: 1015
  Synthetic polymer

SEQ ID NO: 2733 - DNA, 1341 bp, Artificial Sequence; identical to SEQ ID NO: 744
  Synthetic polymer

SEQ ID NO: 2734 - DNA, 1370 bp, Artificial Sequence
  Synthetic polymer
gtttgatcctggctcaggacgaacgctggcggcacgcctaacacatgcaagtcgaacggacgagagagaagcttgcttttctcaagttagtggcggacgggtgagtaacacgtgagcaacctgcctttgagagggggatagcttctagaaatggatggtaataccctataatatacatttaaggcatcttagatgtatcaaaagaattatcgctcaaagatgggctcgcgtctgattagatagttggtgaggtaacggctcaccaagtcgacgatcagtagccggactgagaggttgaacggccacattgggactgagacacggcccagactcctacgggaggcagcagtggggaatattgcacaatggggggaaccctgatgcagcgatgccgcgtggaggaagaaggttttcggattgtaaactccttttatcagggacgataatgacggtacctgaagaaaaagctccggctaactacgtgccagcagccgcggtaatacgtagggagcgagcgttgtccggaattactgggtgtaaagggagcgtaggcgggattgcaagtcagatgtgaaaacttaaggctcaaccttaagattgcatttgaaactgtagttcttgagtgaagtagaggtaagcggaattcctagtgtagcggtgaaatgcgtagatattaggaggaacatcggtggcgaaggcggcttactgggcttttactgacgctgaggctcgaaagcgtggggagcaaacaggattagataccctggtagtccacgctgtaaacgatgattactaggtgtggggggactgaccccttccgtgccgcagttaacacaataagtaatccacctggggagtacgaccgcaaggttgaaactcaaaggaattgacgggggcccgcacaagcagtggagtatgtggtttaattcgaagcaacgcgaagaaccttaccaggtcttgacatcgtatgcataatctagagatagatgaaatcctttcggggacatatagacaggtggtgcatggttgtcgtcagctcgtgtcgtgagatgttgggttaagtcccgcaacgagcgcaacccttaccattagttgctacgcaagagcactctaatgggactgccgttgacaaaacggaggaaggtggggatgacgtcaaatcatcatgccccttatgacctgggctacacacgtactacaatggcaattaacagagggaagcaaagcagtgatgcagagcaaatcccgaaaaattgtcccagctcagattgcaggctgaaactcgcctgcatgaagtcggaattgctagtaatcgcagatcagcatgctgcggtgaatacgttcccgggccttgtacacaccgcccgtca

SEQ ID NO: 2735 - DNA, 1426 bp, Artificial Sequence
  Synthetic polymer
agagtttgatcctggctcaggacgaacgctggcggcacgcttaacacatgcaagtcgaacggagaattgagagcttgcttttaattcttagtggcggacgggtgagtaacacgtgaggaacctgcctctgagtgtgggatagcttctggaaacggatggtaataccacataacattactggatcgcatggtttggtaatcaaagatttattgctcagagatggcctcgcgtctgattagatagttggtgaggtaacggctcaccaagtcgacgatcagtagccggactgagaggttggacggccacattgggactgagacacggcccagactcctacgggaggcagcagtggggaatattgcacaatgggggaaaccctgatgcagcgatgccgcgtggaggaagaaggttttcggattgtaaactcctgtcgtaagggacgataatgacggtaccttacaagaaagctccggctaactacgtgccagcagccgcggtaatacgtagggagcgagcgttgtccggaattactgggtgtaaagggagcgtaggcgggacggcaagtcagatgtgaaatatacgtgctcaacatgtagactgcatttgaaactgtcgttcttgagtgaggtagaggtaagcggaattcctggtgtagcggtgaaatgcgtagagatcaggaggaacatcggtggcgaaggcggcttactgggcctttactgacgctgaggctcgaaagcgtggggagcaaacaggattagataccctggtagtccacgccgtaaacgatgattactaggtgtggggggactgaccccttccgtgccgcagttaacacaataagtaatccacctggggagtacggccgcaaggttgaaactcaaaggaattgacgggggcccgcacaagcagtggagtatgtggtttaattcgaagcaacgcgaagaaccttaccaggtcttgacatcgagtgacgtactcagagatgagtattcccttcggggcacgaagacaggtggtgcatggttgtcgtcagctcgtgtcgtgagatgttgggttaagtcccgcaacgagcgcaacccttatcattagttgctaccgcaagagcactctaatgagactgccgttgacaaaacggaggaagagtggggatgacgtcaaatcatcatgccccttatgacctgggctacacacgtactacaatggcattcaacagagggaagcaaaacagcgatgtggagcaatcctcaaaaaatgtcccagttcagattgcaggctgcaactcgcctgcatgaagtcggaattgctagtaatcgcagatcagcatgctgcggtgaatacgttcccgggccttgtacacaccgcccgtcacaccatgggagtcggtaacacccaacatcggtagtctaaccgcaaggaggacgccgcc

SEQ ID NO: 2736 - DNA, 1375 bp, Artificial Sequence; identical to SEQ ID NO: 597
  Synthetic polymer

SEQ ID NO: 2737 - DNA, 1335 bp, Artificial Sequence; identical to SEQ ID NO: 674
  Synthetic polymer

SEQ ID NO: 2738 - DNA, 1390 bp, Artificial Sequence; identical to SEQ ID NO: 354
  Synthetic polymer

SEQ ID NO: 2739 - DNA, 1423 bp, Artificial Sequence
  Synthetic polymer
gacgaacgctggcggcgtgcttaacacatgcaagtcgagcgggaaacttcggtttccagcggcggacgggtgagtaacacgtgggcaacctgcctcacaatgagggatagccttccgaaaggaagattaatacctcataatacaaagaaaacgcatgttttctttgccaaagaatttcgttgtgagatgggcccgcggcgcattagcttgttggtgaggtaacggctcaccaaggcttcgatgcgtagccgacctgagagggtgatcggccacattggaactgagacacggtccagactcctacgggaggcagcagtggggaatattgcacaatggaggaaactctgatgcagcaacgccgcgtgagtgatgaaggtcttcggattgtaaagctctgtcttctgggacgataatgacggtaccagaggaggaagccacggctaactacgtgccagcagccgcggtaatacgtagggagcaagcgttgtccggatttactgggtgtaaagggtgcgtaggcggctatgcaagtcagttgtgaaaactatgggctcaacccatagcctgcaattgaaactgcgtggcttgagtgaagtagaggtaggtggaattcccggtgtagcggtgaaatgcgtagagatcgggaggaacaccagtggcgaaggcgacctactgggctttaactgacgctgaggcacgaaagcatgggtagcaaacaggattagataccctggtagtccatgccgtaaacgatgattactaggtgtggggggtctgaccccctccgtgccggagttaacacaataagtaatccacctggggagtacgaccgcaaggttgaaactcaaaggaattgacgggggcccgcacaagcagtggagtatgtggtttaattcgaagcaacgcgaagaaccttaccaggtcttgacatcctactaacgaagcagagatgcattaggtgcccttcggggaaagtagagacaggtggtgcatggttgtcgtcagctcgtgtcgtgagatgttgggttaagtcccgcaacgagcgcgacccttattgttagttgctacgcaagagcactctagcaagactgccgttgacaaaacggaggaaggtggggacgacgtcaaatcatcatgccccttatgacctgggctacacacgtactacaatggccgttaacaaagagaagcgaaaccgcgaggtggagcaaacctataaaaacggtctcagttcggattgtaggctgaaacccgcctgcatgaagttggaattgctagtaatcgcggatcataatgccgcggtgaatacgttcccgggccttgtacacaccgcccgtcacaccatgagagctggtaacacccgaagtccgtgaggtaacctttatggagccagcggccgaaggtgggattagtgattggggtg

SEQ ID NO: 2740 - DNA, 1387 bp, Artificial Sequence; identical to SEQ ID NO: 318
  Synthetic polymer

SEQ ID NO: 2741 - DNA, 1398 bp, Artificial Sequence
  Synthetic polymer
ttcgcccttagagtttgatcctggctcaggatgaacgctggcggcgtgcctaacacatgcaagtcgaacggagttcttaaggaatgcgacttcggtcaaatgacttttgaacttagtggcggacgggtgagtaacgcgtgagcaacctgcctttcagagggggataacatttggaaacagatgctaataccgcataagattacagtaccgcatgatacagtgatcaaaggagcaatccgctgaaagatgggctcgcgtccgattagatagttggtgaggtaacggctcaccaagccgacgatcggtagccggactgagaggttgaacggccacattgggactgagacacggcccagactcctacgggaggcagcagtggggaatattgcacaatggagggaactctgatgcagcgatgccgcgtggaggaagaaggttttcggattgtaaactccttttatcagggacgataatgacggtacctgaagaaaaagctccggctaactacgtgccagcagccgcggtaatacgtagggagcgagcgttgtccggaattactgggtgtaaagggagcgtaggcgggatagcaagtcagatgtgaaaactatgggctcaacctgtagattgcatttgaaactgttgttcttgagtgaagtagaggtaagcggaattcctagtgtagcggtgaaatgcgtagatattaggaggaacatcggtggcgaaggcggcttactgggcttttactgacgctgaggctcgaaagcgtggggagcaaacaggattagataccctggtagtccacgctgtaaacgatgattactaggtgtggggggactgaccccttccgtgccgcagttaacacaataagtaatccacctggggagtacgaccgcaaggttgaaactcaaaggaattgacgggggcccgcacaagcagtggagtatgtggtttaattcgaagcaacgcgaagaaccttaccaggtcttgacatcgtatgcatagtctagagatagatgaaatcccttcggggacatatagacaggtggtgcatggttgtcgtcagctcgtgtcgtgagatgctgggttaagtcccgcaacgagcgcaacccttaccattagttgctacgcaagagcactctaatgggactgccgttgacaaaacggaggaaggtggggatgacgtcaaatcatcatgccccttatgacctgggctacacacgtactacaatggcaataaaacagagggaagcaaaacagcgatgtggagcaaatcccgaaaaattgtcccagttcagactgcaggctgaaactcgcctgcatgaagtcggaattgctagtaatcgcagatcagcatgctgcggtgaatacgttcccgggccttgcacacaccgcccgtca

SEQ ID NO: 2742 - DNA, 1489 bp, Artificial Sequence; identical to SEQ ID NO: 531
  Synthetic polymer

SEQ ID NO: 2743 - DNA, 1452 bp, Artificial Sequence; identical to SEQ ID NO: 14
  Synthetic polymer

SEQ ID NO: 2744 - DNA, 1475 bp, Artificial Sequence; identical to SEQ ID NO: 846
  Synthetic polymer

SEQ ID NO: 2745 - DNA, 1476 bp, Artificial Sequence
  Synthetic polymer
agtttgattctggctcaggacgaacgctggcggcgtgcctaacacatgcaagtcgaacgaggctaggaaagcttgctttccgaaacctagtggcggacgggtgagtaacgcgtgagtaacctgcctttcagaggggaataacgttctgaaaagaacgctaataccgcataacgtacagttaccgcatggtagcagtaccaaaggagcaatccgctgaaagatggactcgcgtccgattagctagttggtggggtaaaggcctaccaaggcgacgatcggtagccggactgagaggttgaacggccacattgggactgagacacggcccagactcctacgggaggcagcagtgggggatattgcacaatgggggaaaccctgatgcagcaacgccgcgtgtgggaagaaggttttcggattgtaaaccactgttcttggtgaagataatgacggtaaccaaggagaaagctccggctaactacgtgccagcagccgcggtaatacgtagggagcaagcgttgtccggatttactgggtgtaaagggtgcgtaggcggctaggcaagtcagacgtgaaaaccatgggctcaacctgtggactgcgtttgaaactgtttagcttgagtgaagtagaggtaggcggaattcccggtgtagcggtgaaatgcgtagagatcgggaggaacaccagtggcgaaggcggcctactgggctttaactgacgctgaggcacgaaagcatgggtagcaaacaggattagataccctggtagtccatgccgtaaacgatgattactaggtgtggggggtctgaccccctccgtgccggagttaacacaataagtaatccacctggggagtacggccgcaaggttgaaactcaaaggaattgacgggggcccgcacaagcagtggagtatgtggtttaattcgaagcaacgcgaagaaccttaccaggtcttgacatccgactaacgaagtagagatacattaggtgcctttcggggaaagtcgagacaggtggtgcatggttgtcgtcagctcgtgtcgtgagatgttgggttaagtcccgcaacgagcgcaacccttgtcattagttgctgcggtaagagcactctaatgagactgccgttgacaaaacggaggaaggtggggacgacgtcaaatcatcatgccccttatgacttgggctacacacgtgctacaatggcgtaaacaaagggaagcaaagctgtgaagccgagcaaatctcaaaaataacgtctcagttcggactgtagtctgcaacccgactacacgaagctggaatcgctagtaatcgcagatcagaatgctgcggtgaatacgttcccgggtcttgtacacaccgcccgtcacaccatgggagttgggaatgcccgaagccagtgacctaaccgaaaggaaggagctgtcgaaggcaggctcgataactggggtgaagtcgtaacaaggtagcc

SEQ ID NO: 2746 - DNA, 1381 bp, Artificial Sequence; identical to SEQ ID NO: 319
  Synthetic polymer

SEQ ID NO: 2747 - DNA, 1448 bp, Artificial Sequence
  Synthetic polymer
gatgaacgctggcggcgtgcttaacacatgcaagtcgaacggttaaacatttcattgaggcttcggcggatttgatctgtttctagtggcggacgggtgagtaacgcgtgagtaacctgcctttcagaggggaataacgttctgaaaagaacgctaataccgcataacgtacagttaccgcatggtagcagtaccaaaggagcaatccgctgaaagatggactcgcgtccgattagctagttggtggggtaaaggcctaccaaggcgacgatcggtagccggactgagaggttgaacggccacattgggactgagacacggcccagactcctacgggaggcagcagtgggggatattgcacaatgggggaaaccctgatgcagcaacgccgcgtgtgggaagaaggttttcggattgtaaaccactgttcttggtgaagataatgacggtaaccaaggagaaagctccggctaactacgtgccagcagccgcggtaatacgtagggagcaagcgttgtccggatttactgggtgtaaagggtgcgtaggcggctaggcaagtcagacgtgaaaaccatgggctcaacctgtggactgcgtttgaaactgtttagcttgagtgaagtagaggtaggcggaattcccggtgtagcggtgaaatgcgtagagatcgggaggaacaccagtggcgaaggcggcctactgggctttaactgacgctgaggcacgaaagcatgggtagcaaacaggattagataccctggttagtccatgccgtaaacgatgaatttactagggtgtggggggggtctgacccccctcccgtgccggagttaacacaataagtaaatccacctgggggagtacggccgcaaggttgaaactcaaaggaattgacgggggcccgcacaagcagtggagtatgtggtttaattcgaagcaacgcgaagaaccttaccaggtcttgacatccgactaacgaagtagagatacattaggtgcctttcggggaaagtcgagacaggtggtgcatggttgtcgtcagctcgtgtcgtgagatgttgggttaagtcccgcaacgagcgcaacccttgtcattagttgctacgtaagagcactctaatgagactgccgttgacaaaacggaggaaggtggggacgacgtcaaatcatcatgccccttatgacctgggctacacacgtactacaatggccgttaacagagggaagcaataccgtgaggtggagccaaaccctaaaaacggtcccagttcggattgtaggctgaaactcgcctacatgaagttggaattgctagtaatcgcggatcagcatgccgcggtgaatacgttcccgggccttgtacacaccgcccgtcacaccatgggagccggtaatacccgaagccagtagtctaaccgtaaggaggacgctgtcgaaggtaggat

SEQ ID NO: 2748 - DNA, 1432 bp, Artificial Sequence; identical to SEQ ID NO: 993
  Synthetic polymer

SEQ ID NO: 2749 - DNA, 1365 bp, Artificial Sequence; identical to SEQ ID NO: 659
  Synthetic polymer

SEQ ID NO: 2750 - DNA, 1373 bp, Artificial Sequence; identical to SEQ ID NO: 571
  Synthetic polymer

SEQ ID NO: 2751 - DNA, 1476 bp, Artificial Sequence; identical to SEQ ID NO: 69
  Synthetic polymer

SEQ ID NO: 2752 - DNA, 1378 bp, Artificial Sequence; identical to SEQ ID NO: 396
  Synthetic polymer
  misc_feature (788)..(788): n is a, c, g, or t

SEQ ID NO: 2753 - DNA, 1427 bp, Artificial Sequence; identical to SEQ ID NO: 16
  Synthetic polymer

SEQ ID NO: 2754 - DNA, 1404 bp, Artificial Sequence; identical to SEQ ID NO: 314
  Synthetic polymer

SEQ ID NO: 2755 - DNA, 1327 bp, Artificial Sequence; identical to SEQ ID NO: 1019
  Synthetic polymer

SEQ ID NO: 2756 - DNA, 1369 bp, Artificial Sequence; identical to SEQ ID NO: 649
  Synthetic polymer

SEQ ID NO: 2757 - DNA, 1406 bp, Artificial Sequence; identical to SEQ ID NO: 551
  Synthetic polymer

SEQ ID NO: 2758 - DNA, 1461 bp, Artificial Sequence; identical to SEQ ID NO: 508
  Synthetic polymer
  misc_feature (688)..(688): n is a, c, g, or t

SEQ ID NO: 2759 - DNA, 1508 bp, Artificial Sequence; identical to SEQ ID NO: 557
  Synthetic polymer
  misc_feature (20)..(21): n is a, c, g, or t

SEQ ID NO: 2760 - DNA, 1404 bp, Artificial Sequence
  Synthetic polymer
ttcgcccttagagtttgatcctggctcaggacgatttctggcggcgtgcctaacacatgcaagtcgaacggaactttttttaattgatttcttcggaatgattttgattaagtttagtggcggacgggtgagtaacgcgtgagtaacctgcctctgagaggggaataacattctgaaaagaatgctaataccgcataacatatatttatcgcatggtagatatatcaaagatttatcgctcagagatggactcgcgtccgattagttagttggtgaggtaacggctcaccaagaccgcgatcggtagccggactgagaggttgaacggccacattgggactgagacacggcccagactcctacgggaggcagcagtgggggatattgcgcaatgggggaaaccctgacgcagcaacgccgcgtgaaggatgaaggtcttcggattgtaaacttcttttattaaggacgaagaaagtgacggtacttaatgaataagctccggctaactacgtgccagcagccgcggtaatacgtatggagcaagcgttatccggatttactgggtgtaaagggtgcgtaggcggcacagcaagtcagatgtgaaagaccggggctcaaccccggggctgcatttgaaactgccgagcttgagtccgggagaggcaggcggaattcctagtgtagcggtgaaatgcgtagatattaggaggaacaccagtggcgaaggcggcctgctggaccggaactgacgctgaggcacgaaagcgtggggagcaaacaggattagataccctggtagtccacgccgtaaacgatgactactaggtgtcggtgtgcaaagcacatcggtgccgcagcaaacgcaataagtagtccacctggggagtacgttcgcaagaatgaaactcaaaggaattgacggggacccgcacaagcggtggagcatgtggtttaattcgaagcaacgcgaagaaccttacctggtcttgacatccggatgacgggcgagtaatgtcgccgtcccttcggggcatccgagacaggtggtgcatggttgtcgtcagctcgtgtcgtgagatgttgggttaagtcccgcaacgagtgcaacccttatcttcagtagccagcatataaggtgggcactctggagagactgccagggagaacctggaggaaggtggggatgacgtcaaatcatcatgccccttatggccagggctacacacgtgctacaatggcgtaaacaaagggaagcgagagggtgacctgaagcgaatcccaaaaataacgtctcagttcggattgtagtctgcaactcgactacatgaagctggaatcgctagtaatcgcggatcagcatgccgcggtgaatacgttcccgggtcttgcactcaccgcccgtca

SEQ ID NO: 2761 - DNA, 1389 bp, Artificial Sequence; identical to SEQ ID NO: 249
  Synthetic polymer

SEQ ID NO: 2762 - DNA, 1384 bp, Artificial Sequence
  Synthetic polymer
ttcgcccttagagtttgatcctggctcaggacgaacgctggcggcgcgcctaacacatgcaagtcgaacggagctatgttgaaagcttgctggatatatagcttagtggcggacgggtgagtaacacgtgagcaacctgcctttcagagtggaataacgtttggaaacgaacgctaataccgcataatgtcagaggatggcatcattctttgaccaaagatttatcgctgaaagatgggctcgcggccgattaggtagttggtgagataatagcccaccaagccgacgatcggtagccggactgagaggttgaacggccacattgggactgagacacggcccagactcctacgggaggcagcagtgggggatattgcacaatgggggaaaccctgatgcagcgacgccgcgtgagggaagacggccttcgggttgtaaacctctgtcttcggggacgaataaatgacggtacccgaggaggaagccacggctaactacgtgccagcagccgcggtaatacgtaggtggcaagcgttgtccggaattactgggtgtaaagggagcgtaggcggggaggcaagttgaatgtctaaactatcggctcaactgatagtcgcgttcaaaactgccactcttgagtgcagtagaggtaggcggaattcctagtgtagcggtgaaatgcgtagatattaggaggaacaccagtggcgaaggcggcctactgggctgtaactgacgctgaggctcgaaagcgtgggtagcaaacaggattagataccctggtagtccacgccgtaaacgatgatttactaggtgtggggggactgaccccttccgtgccggagttaacacaataagtaatccacctggggagtacggccgcaaggctgaaactcaaaggaattgacgggggcccgcacaagcagtggagtatgtggtttaattcgaagcaacgcgaagaaccttaccaggtcttgacatcgagtgacgaacttagagataagttcttccttcgggacacgaagacaggtggtgcatggttgtcgtcagctcgtgtcgtgagatgttgggttaagtcccgcaacgagcgcaacccttatcattagttgctacgcaagagcactctaatgagactgccgttgataaaacggaggaaggtggggatgacgtcaaatcatcatgccccctatgagcagggctacacacgtgctacaatggcgtaaacaaagggaggcagaaccgcgaggtcgagcaaatcccaaaaataacgtctcagttcggattgtagtctgcaactcgactacatgaagctggaatcgctagtaatcgcgaatcagaatgtcgcggtgaatacgttcccgggtcttgtacacaccgcccgtca

SEQ ID NO: 2763 - DNA, 1468 bp, Artificial Sequence; identical to SEQ ID NO: 969
  Synthetic polymer

SEQ ID NO: 2764 - DNA, 1379 bp, Artificial Sequence; identical to SEQ ID NO: 713
  Synthetic polymer

SEQ ID NO: 2765 - DNA, 1445 bp, Artificial Sequence; identical to SEQ ID NO: 1057
  Synthetic polymer

SEQ ID NO: 2766 - DNA, 1368 bp, Artificial Sequence; identical to SEQ ID NO: 733
  Synthetic polymer

SEQ ID NO: 2767 - DNA, 1393 bp, Artificial Sequence; identical to SEQ ID NO: 142
  Synthetic polymer

SEQ ID NO: 2768 - DNA, 1443 bp, Artificial Sequence
  Synthetic polymer
cgctggcggcgtgcataacacatgcaagtcgaacgatgaaacttagctgatttcttcggaatgaaattaagaggattagtggcgaacgggtgagtaacacgtgagtaacctgccttacacaaggggatagcctttggaaacgaggaataataccctataaagttagtcaatcgcatggtagactaaccaaagatttatcggtgtaagatggacttgcgtctgattagctagttggtggggtaaaggcctaccaaggcgacgatcggtagccggactgagaggttgaacggccacattgggactgagacacggcccagactcctacgggaggcagcagtgggggatattgcacaatgggggaaaccctgatgcagcaacgccgcgtgtgggaagaaggttttcggattgtaaaccgctgttcttggtgaagataatgacggtaaccaaggagaaagctccggctaactacgtgccagcagccgcggtaatacgtagggagcaagcgttgtccggatttactgggtgtaaagggtgcgtaggcggctaggcaagtcagacgtgaaaaccatgggctcaacctgtggactgcgtttgaaactgtttagcttgagtgaagtagaggtaggcggaattcccggtgtagcggtgaaatgcgtagagatcgggaggaacaccagtggcgaaggcggcctactgggctttaactgacgctgaggcacgaaagcatgggtagcaaacaggattagataccctggtagtccatgccgtaaacgatgattactaggtgtggggggtctgaccccctccgtgccggagttaacacaataagtaatccacctggggagtacggccgcaaggttgaaactcaaaggaattgacgggggcccgcacaagcagtggagtatgtggtttaattcgaagcaacgcgaagaaccttaccaggtcttgacatccgactaacgaagtagagatacattaggtgcctttcggggaaagtcgagacaggtggtgcatggttgtcgtcagctcgtgtcgtgagatgttgggttaagtcccgcaacgagcgcaacccttgtcattagttgctacgtaagagcactctaatgagactgccgttgacaaaacggaggaaggtggggacgacgtcaaatcatcatgccccttatgacctgggctacacacgtactacaatggccgttaacagagggaagcaataccgtgaggtggagccaaaccctaaaaacggtcccagttcggattgtaggctgaaactcgcccacatgaagttggaattgctagtaatcgcggatcagcatgccgcggtgaatacgttcccgggccttgtacacaccgcccgtcacaccatgggagccggtaatacccgaagccagtagtctaaccgtaaggaggacgctgtcgaaggtaggattggcgactggggtg

SEQ ID NO: 2769 - DNA, 1395 bp, Artificial Sequence; identical to SEQ ID NO: 257
  Synthetic polymer

SEQ ID NO: 2770 - DNA, 1352 bp, Artificial Sequence; identical to SEQ ID NO: 99
  Synthetic polymer

SEQ ID NO: 2771 - DNA, 1378 bp, Artificial Sequence
  Synthetic polymer
agagtttgatcctggctcagcatgaacgcttgcggcatgcctaacacatgcaagtcgaacggagattacgaaagcttgcttttgtaatcttcgtggcggacgggtgagtaacgcgtgagtaacctgcctctcagaaggggataacgttctgaaaagaacgctaataccgcatataatcacgaaaccgcatggttttgtgatgaaaggagtaatccgctgagagatggactcgcgtctgattagctagatggtggggtaacggcttaccatggcgacgatcagtagccggactgagaggttgaacggccacattgggactgagacacggcccagactcctacgggaggcagcagtgggggatattgcgcaatgggggaaaccctgacgcagcaatgccgcgtgaaggatgaaggttttcggattgtaaacttcttttgttaaggacgaagaatgacggtacttaacgaataagctccggctaactatgtgccagcagccgcggtaatacatagggagcaagcgttatccggatttactgggtgtaaagggtgcgtaggcggctaagcaagtcagatgtgaaatacacgggctcaactcgtgggctgcatttgaaactgttagcttgagtgaagtagaggcaggcggaattcccggtgtagcggtgaaatgcgtagagatcgggaggaacaccagtggcgaaggcggcctgctgggctttaactaacgctgaggcacgaaagcgtgggtagcaaacaggattagataccctggtagtccacgctgtacacgatgattactaggtgtgggtggattgactccatccgtgctgcagttaacaccataagtaatccacatggggagtacgacagcaaggttgaaaatcaaaggaattgacgggggccagcacaagcaatggagtatatggtttaattcgaatcaatgcgaagaaccttaccaggtcttgacattcaagtaacgaagtagagatacattaggtgcccttcggggaaagttgagacaggtggtgcatggttgtcgtcagcttgtgttgtgagatggtgggttaagtccatcaacgagtgcaacctttgctattagttgctacgcaagatcattgtaataggaatgccgtagaccacacggaggaagatgggaacgaagtcaaattatcatgccctttatgatttggtctacacacgtagtacaatggccattaacaaagggaagcgaaaccgtgaggtggagcatacccccatgaatggtcccagattgaattgtaggttacaacccgcctatatggagttggaattgcatagtaatggttgtatcagaatgacacggagaatatgttcacgggatctgtacacgccgccagtca

SEQ ID NO: 2772 - DNA, 1367 bp, Artificial Sequence; identical to SEQ ID NO: 412
  Synthetic polymer

SEQ ID NO: 2773 - DNA, 1378 bp, Artificial Sequence; identical to SEQ ID NO: 45
  Synthetic polymer
  misc_feature (250)..(250): n is a, c, g, or t
  misc_feature (811)..(811): n is a, c, g, or t

SEQ ID NO: 2774 - DNA, 1393 bp, Artificial Sequence; identical to SEQ ID NO: 399
  Synthetic polymer

SEQ ID NO: 2775 - DNA, 1377 bp, Artificial Sequence; identical to SEQ ID NO: 188
  Synthetic polymer

SEQ ID NO: 2776 - DNA, 1384 bp, Artificial Sequence; identical to SEQ ID NO: 742
  Synthetic polymer

SEQ ID NO: 2777 - DNA, 1449 bp, Artificial Sequence; identical to SEQ ID NO: 1122
  Synthetic polymer

SEQ ID NO: 2778 - DNA, 1404 bp, Artificial Sequence
  Synthetic polymer
ttcgcccttagagtttgatcctggctcaggatgaacgctggcggcgtgcctaacacatgcaagtcgaacggagttcttaaggaatgcgacttcggtcaaatgacttttgaacttagtggcggacgggtgagtaacgcgtgagcaacctgcctttcagagggggataacatttggaaacagatgctaataccgcataagattacagtaccgcatgatacagtgatcaaaggagcaatccgctgaaagatgggctcgcgtccgattagatagttggtgaggtaacggctcaccaagtcgacgatcggtagccggactgagaggttgaacggccacattgggactgagacacggcccagactcctacgggaggcagcagtggggaatattgcacaatgggcgaaagcctgatgcagcaacgccgcgtgagggaagacggttttcggattgtaaacctctgttttcggtgacgaataaatgacggtaaccgagtaggaagccacggctaactacgtgccagcagccgcggtaatacgtaggtggcaagcgttatccggaattactgggtgtaaagggagcgcaggcgggatagcaagtcagttgtgaaaactatgggctcaacccatagattgcagttgaaactgttattcttgagtggagtagaggtaagcggaattccgagtgtagcggtgaaatgcgtagatattaggaggaacaccagtggcgaaggcggcttactggacggtaactgacgttgaggctcgaaagcgtggggagcaaacaggattggataccctggtagtccacgccgtaaacgatgactactaggtgttgggcagcaaagctgttcggtgccgcagcaaacgcaataagtagtccacctggggagtacgttcgcaagaatgaaactcaaaggaattgacggggacccgcacaagcggtggagcatgtggtttaattcgaagcaacgcgaagaaccttacctgctcttgacatctccctgaccggcaagtaatgttgcctttccttcgggacagggatgacaggtggtgcatggttgtcgtcagctcgtgtcgtgagatgttgggttaagtcccgcaacgagcgcaacccctatctttagtagccagcggtcaggccgggcactctagagagactgccagggataacctggaggaaggtggggatgacgtcaaatcatcatgccccttatgagcagggctacacacgtgctacaatggcgtaaacaaagggaggcagaaccgcgaggtcgagcaaatcccaaaaataacgtctcagttcggattgtagtctgcaactcgactacatgaagctggaatcgctagtaatcgcgaatcagaatgtcgcggtgaatacgttcccgggtcttgcacacaccgcccgtca

SEQ ID NO: 2779 - DNA, 1363 bp, Artificial Sequence; identical to SEQ ID NO: 778
  Synthetic polymer

SEQ ID NO: 2780 - DNA, 1391 bp, Artificial Sequence; identical to SEQ ID NO: 145
  Synthetic polymer

SEQ ID NO: 2781 - DNA, 1367 bp, Artificial Sequence
  Synthetic polymer
agagtttgatcctggctcaggacgaacgctggcggcgcgcctaacacatgcaagtcgaacggtgacgagagcttcggctctctgatcagtggcgggcgggtgagtaacacgtgagcaacctgcctatcagagggggacaacagttggaaacgactgctaataccgtataacgtcattggaaggcatcttctgatgaccaaagatttatcgctgatagatgggctcgcgtctgattagatagttggtgaggtaacggcccaccaagtcgacgatcagtagccggactgagaggttgaacggccacattgggactgagacacggcccagactcctacgggaggcagcagtgggggatattggacaatgggggcaaccctgatccagcgacgccgcgtgagggaagaaggttttcggattgtaaacctctgtcagcagggaaaatgatgatggtacctgtggaggaagccacggctaactacgtgccagcagccgcggtaatacgtaggtggcaagcgttgtccggaattactgggtgtaaagggagtgtaggcgggacggtaagtcagaagtgaaaattatgggctcaactcataacctgcttttgaaactgctgttcttgagtgaagtagaggcaagcggaattcctagtgtagcggtgaaatgcgtagatattaggaggaacaccagtggcgaaggcggcttgctgggcttttactgacgctgaggctcgaaagcgtggggagcaaacaggattagataccctggtagtccacgccgtaaacgatgattactaggtgtggggggattgaccccttccgtgccgcagttaacacaataagtaatccacctggggagtacgaccgcaaggttgaaactcaaaggaattgacgggggcccgcacaagcagtggagtatgtggattaattcgaagcaacgcgaagaaccttaccaggtcttgacatcaagtgaccgctctagagatagagccttctcttcggagacacgaagacaggtggtgcatggttgtcgtcagctcgtgtcgtgagatgttgggttaagtcccgcaacgagcgcaacccttatgattagttgctacgcaagagcactctaatcagactgccgttgacaaaacggaggaaggtggggatgacgtcaaatcatcatgccctttatgacctgggcctcacacgtactacaatggcgtttaacaaagagcggcgaaaccgcgaggtggagcaaatctccaaaaaacgtctcagttcagattgcaggctgcaactcgcctgcatgaagtcggaattgctagtaatcgtagatcagcatgctacggtgaatacgttcccgggccttgcactcaccgcccgtca

SEQ ID NO: 2782 - DNA, 1394 bp, Artificial Sequence; identical to SEQ ID NO: 155
  Synthetic polymer

SEQ ID NO: 2783 - DNA, 1497 bp, Artificial Sequence; identical to SEQ ID NO: 803
  Synthetic polymer

SEQ ID NO: 2784 - DNA, 1331 bp, Artificial Sequence; identical to SEQ ID NO: 764
  Synthetic polymer

SEQ ID NO: 2785 - DNA, 1369 bp, Artificial Sequence; identical to SEQ ID NO: 421
  Synthetic polymer

SEQ ID NO: 2786 - DNA, 1351 bp, Artificial Sequence; identical to SEQ ID NO: 36
  Synthetic polymer

SEQ ID NO: 2787 - DNA, 1436 bp, Artificial Sequence; identical to SEQ ID NO: 874
  Synthetic polymer

SEQ ID NO: 2788 - DNA, 1385 bp, Artificial Sequence; identical to SEQ ID NO: 198
  Synthetic polymer

SEQ ID NO: 2789 - DNA, 1366 bp, Artificial Sequence; identical to SEQ ID NO: 148
  Synthetic polymer

SEQ ID NO: 2790 - DNA, 1454 bp, Artificial Sequence
  Synthetic polymer
gctggcggcgtgcctaacacatgcaagtcgaacggagttcttaaggaatgcgacttcggtcaaatgacttttgaacttagtggcggacgggtgagtaacgcgtgagcaacctgcctttcagagggggataacatttggaaacagatgctaataccgcataagattacagtaccgcatgatacagtgatcaaaggagcaatccgctgaaagatgggctcgcgtcccattagatagttggtgaggtaacggctcaccaagtcgacgatcggtagccggactgagaggttgaacggccacattgggactgacacacggcccagactcctacgggaggcagcagtggggaatattgcacaatgggcgaaagcctgatgcagcaacgccgcgtgagggaagacggttttcggattgtaaacctctgttttcggtgacgaacaaatgacggtaaccgagtaggaagccacggctaactacgtgccagcagccgcggtaatacgtaggtggcaagcgttatccggaattactgggtgtaaagggagcgcaggcgggatagcaagtcagctgtgaaaactatgggctcaacccataaactgcagttgaaactgttattcttgagtggagtagaggcaagcggaattccgagtgtagcggtgaaaatgcgtagatattcggaggaacaccagtggcgaaggcggcttgctgggctctaactgacgctgaggctcgaaagtgtggcgagcaaacaggattagataccctggtagtccacactgtaaacgatgattgctaggtgtggggggtctgaccccctccgtgccggagttaacgcaataagcaatccacctggggagtacggccgcaaggttgaaactcaaaggaattgacggggacccgcacaagcagtggattatgtggtttaattcgaagcaacgcgaagaaccttaccaggtcttgacatccgactaacgagatagagatatgtcaggtgcccttcggggaaagtcgagacaggtggtgcatggttgttgtcagctcgtgtcgtgagatgttgggttaagtcccgcaacgagcgcaacccttatccccagtagccagcatttcggatgggcactctgaggagactgccagggataacctggaggaaggtggggatgacgtcaaatcatcatgccccttatgacttgggctacacacgtgctacaatggcgtaaacaaagggaagcaagaccgtgaggtggagcaaatcccaaaaataacgtctcagttcggactgtagtctgcaacccgactacacgaagctggaatcgctagtaatcgcagatcagaatgctgcggtgaatacgttcccgggtcttgtacacaccgcccgtcacaccatgggagttggaaatgcccgaagtcagtgacccaaccgcaaggagggagctgccgaaggcaggttcgataactggggt

SEQ ID NO: 2791 - DNA, 1369 bp, Artificial Sequence; identical to SEQ ID NO: 202
  Synthetic polymer

SEQ ID NO: 2792 - DNA, 1414 bp, Artificial Sequence; identical to SEQ ID NO: 5
  Synthetic polymer

SEQ ID NO: 2793 - DNA, 1369 bp, Artificial Sequence
  Synthetic polymer
agagtttgatcctggctcaggacgaacgctggcggcacgcctaacacatgcaagtcgaacggacgcggaggaagcttgcttcttccaagttagtggcggacgggtgagtaacacgtgagcaacctgcctttaagagggggatagcttctggaaacggatggtaataccccataacatatactgatggcatcttcagtatatcaaagatttatcgcttagagatgggctcgcgtctgattagatagttggtgaggtaacggctcaccaagtcgacgatcagtagccggactgagaggttgaacggccacattgggactgagacacggcccagactcctacgggaggcagcagtggggaatattgcacaatgggggaaaccctgatgcagcgatgccgcgtggaggaagaaggttttcggattgtaaactccttttatcagggacgataatgacggtacctgaagaaaaagctccggctaactacgtgccagcagccgcggtaattcgtagggagcgagcgttgtccggaattactgggtgtaaagggagcgtaggcgggacggtaagtcaggtgtgaaatatacgtgctcaacatgtagactgcacttgaaactgctgttcttgagtgaagtagaggtaagcggaattcctagtgtagcggtgaaatgcgtagatattaggaggaacatcggtggcgaaggcggcttactgggcttttactgacgctgaggctcgaaagcgtggggagcaaacaggattagataccctggtagtccacgctgtaaacgatgattactaggtgtggggggactgaccccttccgtgccgcagttaacacaataagtaatccacctggggagtacgaccgcaaggttgaaactcaaaggaattgacgggggcccgcacaagcagtggagtatgtggtttaattcgaagcaacgcgaaaaaccttaccaggtcttgacatcaagtgacgagccaagagattggttttcccttcggggcacgaagacaggtggtgcatggttgtcgtcagctcgtgtcgtgagatgttgggttaagtcccgcaacgagcgcaacccttacctttagttgctacgcaagagcactctagagggactgccgttgacaaaacggaggaaggtggggatgacgtcaaatcatcatgccccttatgacctgggctacacacgtactacaatggcaattaacagagggaagcaatacagcgatgtggagcaaatccccaaaaattgtcccagttcagattgcaggctgcaactcgcctgcatgaagtcggaattgctagtaatcgcagatcagcatgctgcggtgaatacgttcccgggccttgcactcaccgcccgtca

SEQ ID NO: 2794 - DNA, 1483 bp, Artificial Sequence; identical to SEQ ID NO: 482
  Synthetic polymer

SEQ ID NO: 2795 - DNA, 1399 bp, Artificial Sequence
  Synthetic polymer
ttcgcccttagagtttgatcctggctcaggatgaacgctggcggcgtgcctaacacatgcaagtcgaacggagttcttaaggaatgcgacttcggtcaaatgacttttgaacttagtggcggacgggtgagtaacgcgtgagcaacctgcctttcagagggggataacatttggaaacagatgctaataccgcataagattacagtaccgcatgatacagtgatcaaaggagcaatccgctgaaagatgggctcgcgcccgattagttagttggtgaggtaacggctcaccaagactacgatcggtagccggactgagaggttgatcggccacattgggactgagacacggcccagactcctacgggaggcagcagtgggggatattgcgcaatgggggaaaccctgacgcagcaacgccgcgtgaaggaagaaggtcttcggattgtaaacttcttttgtcagggacgaagaaagtgacggtacctgacgaataagctccggctaactacgtgccagcagccgcggtaatacgtagggagcgagcgttgtccggatttactgggtgtaaagggtgcgtaggcggccgagcaagtcagttgtgaaaactatgggcttaacccataacgtgcaattgaaactgtccggcttgagtgaagtagaggtaggcggaattcccggtgtagcggtgaaatgcgtagagatcgggaggaacaccagtggcgaaggcggcctactgggctttaactgacgctgaggcacgaaagcatgggtagcaaacaggattagataccctggtagtccatgccgtaaacgatgattactaggtgtggggggactgaccccttccgtgccgcagttaacacaataagtaatccacctggggagtacggccgcaaggttgaaactcaaaggaattgacgggggcccgcacaagcagtggagtatgtggtttaattcgaagcaacgcgaagaaccttaccaggtcttgacatcctgagaatccttaagagattagggagtgccttcgggaactcagagacaggtggtgcatggttgtcgtcagctcgtgtcgtgagatgttgggttaagtcccgcaacgagcgcaacccttgctattagttgctacgcaagagcactctaataggactgccgttgacaaaacggaggaaggtggggacgacgtcaaatcatcatgccccttatgacctgggctacacacgtactacaatggccattaacagagggaagcaaaaccgcgaggcagagcaaacccctaaaaatggtcccagttcggattgtaggctgcaacccgcctacatgaagttggaattgctagtaatcgcggatcagcatgccgcggtgaatacgttcccgggccttgcactcaccgcccgtca

SEQ ID NO: 2796 - DNA, 1370 bp, Artificial Sequence; identical to SEQ ID NO: 121
  Synthetic polymer

SEQ ID NO: 2797 - DNA, 1359 bp, Artificial Sequence; identical to SEQ ID NO: 769
  Synthetic polymer

SEQ ID NO: 2798 - DNA, 1482 bp, Artificial Sequence; identical to SEQ ID NO: 462
  Synthetic polymer

SEQ ID NO: 2799 - DNA, 1368 bp, Artificial Sequence; identical to SEQ ID NO: 370
  Synthetic polymer

SEQ ID NO: 2800 - DNA, 1449 bp, Artificial Sequence; identical to SEQ ID NO: 502
  Synthetic polymer

SEQ ID NO: 2801 - DNA, 1393 bp, Artificial Sequence; identical to SEQ ID NO: 413
  Synthetic polymer

SEQ ID NO: 2802 - DNA, 1408 bp, Artificial Sequence; identical to SEQ ID NO: 1099
  Synthetic polymer

SEQ ID NO: 2803 - DNA, 1343 bp, Artificial Sequence; identical to SEQ ID NO: 752
  Synthetic polymer
  misc_feature (1164)..(1164): n is a, c, g, or t

SEQ ID NO: 2804 - DNA, 1468 bp, Artificial Sequence; identical to SEQ ID NO: 972
  Synthetic polymer

SEQ ID NO: 2805 - DNA, 1370 bp, Artificial Sequence; identical to SEQ ID NO: 593
  Synthetic polymer

SEQ ID NO: 2806 - DNA, 1380 bp, Artificial Sequence; identical to SEQ ID NO: 1082
  Synthetic polymer

SEQ ID NO: 2807 - DNA, 1458 bp, Artificial Sequence; identical to SEQ ID NO: 6
  Synthetic polymer

SEQ ID NO: 2808 - DNA, 1372 bp, Artificial Sequence; identical to SEQ ID NO: 709
  Synthetic polymer

SEQ ID NO: 2809 - DNA, 1471 bp, Artificial Sequence
  Synthetic polymer
agagtttgatcctggctcaggacgaacgctggcggcacgcctaacacatgcaagtcgaacggtgaagggggagcttgctcctccggaacagtggcggacgggtgagtaacacgtgagcaacctgcctttcagagggggacaacagttggaaacgactgctaataccgcataacgtattttggcggcatcgccggaataccaaaggagcaatccgctgaaagatgggctcgcgtctgattagatagttggtgaggtaacggctcaccaagtcgacgatcagtagccggactgagaggttgaacggccacattgggactgagacacggcccagactcctacgggaggcagcagtgggggatattggacaatgggggaaaccctgatccagcgatgccgcgtgagggaagaaggttttcggattgtaaacctctgtggagggggacgataatgacggtacccctttaggaagccacggctaactacgtgccagcagccgcggtaatacgtaggtggcgagcgttgtccggaattactgggtgtaaagggagtgtaggcgggaaagcaagtcagaagtgaaaactatgggcttaacctatagcctgcttttgaaactgtttttcttgagtgaagtagaggcaagcggaattcctagtgtagcggtgaaatgcgtagatattaggaggaacaccagtggcgaaggcggcttgctgggcttttactgacgctgaggctcgaaagcgtggggagcaaacaggattagataccctggtagtccacgccgtaaacgatgatcactaggtgtggggagcgaacctttccgtgccggagtaaacacaataagtgatccacctggggagtacggccgcaaggctgaaactcaaaggaattaacgggggcccgcacaagcagtggagtatgtggtttaattcgaagcaacgcgaagaaccttaccgggtcttgacatcgagtgaaaggtcaagagattgatccctctcttcggagacacgaagacaggtggtgcatggttgtcgtcagctcgtgtcgtgagatgttgggttaagtcccgcaacgagcgcaacccttatcattagttgctacgcaagagcactctaatgagactgccgttgacaaaacggaggaaggtggggatgacgtcaaatcatcatgccctttatgacccgggctacacacgtactacaatggtgtttaacaaagagaagcgaagccgcgaggcggagcaaatctcgaaaaaacatctcagttcagattgcaggctgcaactcgcctgcatgaagtcggaattgctagtaatcgtaggtcagcatactacggtgaatacgttcccgggccttgtacacaccgcccgtcaaaccatgagagttggcaacacccgaagtcggtagtctaaccgcaaggaggacgccgccgaaggtggggttgatgattagggttaagtcgtaacaaggtaacc

SEQ ID NO: 2810 - DNA, 1516 bp, Artificial Sequence
  Synthetic polymer
  misc_feature (572)..(572): n is a, c, g, or t
agagtttgatcatggctcaggacgaacgctggcggcgtgcctaacacatgcaagtcgaacggagtgattcgaaagcttgcttttgaatcacttagtggcggacgggtgagtaacgcgtgagtaacctgcctttcagagggggataacattctgaaaaggatgctaataccgcatgacatatcgaggccgcatggtcttggtatcaaaggagcaatccgctgagagatggactcgcgtccgattagccagttggcggggtaacggcccaccaaagcgacgatcggtagccggactgagaggttgaacggccacattgggactgagacacggcccagactcctacgggaggcagcagtgggggatattgcacaatggaggaaactctgatgcagcaacgccgcgtgagggaagaaggtcttcggattgtaaacctttgtccttggtgacgaaacaaatgacggtagccaaggaggaagctccggctaactacgtgccagcagccgcggtaatacgtagggagcaagcgttgtccggatttactgggtgtaaagggtgccktaggcsgctctgcnaagtcaggcgtgaaaactatgggcttaacccatagactgcgtttgaaactgtggggcttgagtgaagtagaggtaggcggaattcccggtgtagcggtgaaatgcgtagagatcgggaggaacaccagtggcgaaggcggcctactgggctttaactgacgctgaagcacgaaagcatgggtagcaaacaggattagataccctggtagtccatgccgtaaacgatgattactaggtgtgggtggtctgaccccatccgtgccggagttaacacaataagtaatccacctggggagtacggccgcaaggttgaaactcaaaggaattgacgggggcccgcacaagcagtggagtatgtggtttaattcgaagcaacgcgaagaaccttaccaggtcttgacatccaactaacgaggcagagatgcgttaggtgcccttcggggaaagttgagacaggtggtgcatggttgtcgtcagctcgtgtcgtgagatgttgggttaagtcccgcaacgagcgcaacccttgtgattagttgctacgtaagagcactctaatcagactgccgttgacaaaacggaggaaggtggggacgacgtcaaatcatcatgccctttatgacctgggccacacacgtactacaatggccattaacagagggaagcaagaccgcgaggtggagcaaaaccctaaaaatggtcccagttcggatcgcaggctgcaacccgcctgcgtgaagttggaattgctagtaatcgcggatcagaatgccgcggtgaatacgttcccgggccttgtacacaccgcccgtcacaccatgggagccggtaatacccgaagtcagtagtctaaccgcaagggggacgctgccgaaggtaggattggcgactggggtgaagtcgtaacaaggtagccgtatcggaaggtgcggctggatcacctcctt

SEQ ID NO: 2811 - DNA, 1388 bp, Artificial Sequence; identical to SEQ ID NO: 344
  Synthetic polymer

SEQ ID NO: 2812 - DNA, 1376 bp, Artificial Sequence; identical to SEQ ID NO: 218
  Synthetic polymer

SEQ ID NO: 2813 - DNA, 1402 bp, Artificial Sequence; identical to SEQ ID NO: 663
  Synthetic polymer

SEQ ID NO: 2814 - DNA, 1392 bp, Artificial Sequence
  Synthetic polymer
ttcgcccttagagtttgatcctggctcaggacgaacgctggcggcgtgcctaacacatgcaagtcgaacgaagctttgaggagcttgctttttaaagcttagtggcggacgggtgagtaacgcgtgagcaacctgcctctcagagggggataacgttttgaaaagaacgctaataccgcataacatatcggaaccgcatgattctgatatcaaaggagcaatccgctgagagatgggctcgcgtccgattagttagttggtgaggtaacggctcaccaagactacgatcggtagccggactgagaggttgatcggccacattgggactgagacacggcccagactcctacgggaggcagcagtgggggatattgcgcaatgggggaaaccctgacgcagcaacgccgcgtgaaggaagaaggtcttcggattgtaaacttcttttgtcagggacgaagaaagtgacggtacctgacgaataagctccggctaactacgtgccagcagccgcggtaatacgtagggagcgagcgttgtccggatttactgggtgtaaagggtgcgtaggcggccgagcaagtcagttgtgaaaactatgggcttaacccataacgtgcaattgaaactgtccggcttgagtgaagtagaggtaggcggaattcccggtgtagcggtgaaatgcgtagagatcgggaggaacaccagtggcgaaggcggcctactgggctttaactgacgctgaggcacgaaagcatgggtagcaaacaggattagataccctggtagtccatgccgtaaacgatgattactaggtgtggggggactgaccccttccgtgccgcagttaacacaataagtaatccacctggggagtacggccgcaaggttgaaactcaaaggaattgacgggggcccgcacaagcagtggagtatgtggtttaattcgaagcaacgcgaagaaccttaccaggtcttgacatcctgagaatccttaagagattagggagtgccttcgggaactcagagacaggtggtgcatggttgtcgtcagctcgtgtcgtgagatgttgggttaagtcccgcaacgagcgcaacccctatcctcagtagccagcaagttaagttgggcactctggggagactgccagggataacctggaggaaggcggggatgacgtcaaatcatcatgccccttatgatttgggctacacacgtgctacaatggcgtaaacaaagggaagcgagattgtgagatggagcaaatcccaaaaataacgtcccagttcggactgtagtctgcaacccgactacacgaagctggaatcgctagtaatcgcggatcagaatgccgcggtgaatacgttcccgggtcttgcactcaccgcccgtca

SEQ ID NO: 2815 - DNA, 1383 bp, Artificial Sequence; identical to SEQ ID NO: 103
  Synthetic polymer

SEQ ID NO: 2816 - DNA, 1484 bp, Artificial Sequence
  Synthetic polymer
ttgagagtttgatcctggctcaggacgaacgctggcggcgtgcctaacacatgcaagtcgaacgaggctaggaaagcttgctttccgatgcctagtggcggacgggtgagtaacgcgtgagtaacctgcctttcagaggggaataacgttctgaaaagaacgctaataccgcataatgtacagttaccgcatggtagcagtaccaaaggagcaatccgctgagagatggactcgcgtccgattagctagttggtggggtaaaggctcaccaaggcgacgatcggtagccggactgagaggttgaacggccacattgggactgagacacggcccagactcctacgggaggcagcagtgggggatattgcacaatggggggaaccctgatgcagcaacgccgcgtgtgggaagaaggttttcggattgtaaaccactgttcttggtgaagataatgacggtagccaaggagaaagctccggctaactacgtgccagcagccgcggtaatacgtagggagcaagcgttgtccggatttactgggtgtaaagggtgcgtaggcggctaggcaagtcaggcgtgaaaaccatgggctcaacctgtggactgcgtttgaaactgtttagcttgagtgaagtagaggtaggcggaattcccggtgtagcggtgaaatgcgtagagatcgggaggaacaccagtggcgaaggcggcctactgggctttaactgacgctgaggcacgaaagcatgggtagcaaacaggattagataccctggtagtccatgccgtaaacgatgattactaggtgtggggggtctgacccccctccgtgccggagttaacacaataagtaatccacctggggagtacggccgcaaggttgaaactcaaaggaattgacgggggcccgcacaagcagtggagtatgtggtttaattcgaagcaacgcgaagaaccttaccaggtcttgacatccgactaacgaagtagagatacattaggtgcccttttgggaaagtcgagacaggtggtgcatggttgtcgtcagctcgtgtcgtgagatgttgggttaagtcccgcaacgagcgcaacccttgtcattagttgctacgcaagagcactctaatgagactgccgttgacaaaacggaggaaggtggggacgacgtcaaatcatcatgccccttatgacctgggctacacacgtactacaatggccgttaacagagggaagcaataccgcgaggtggagccaaaccctaaaaacggtcccagttcggattgcaggctgaaactcgcctgcatgaagttggaatcgctagtaatcgcggatcagcatgccgcggtgaatacgttcccgggccttgtacacaccgcccgtcacaccatgagagtcgggaacacccgaagtccgtagcctaaccgcaaggagggcgcggccgaaggtgggttcgataattggggtgaagtcgtaacaaggtagccgta

SEQ ID NO: 2817 - DNA, 1438 bp, Artificial Sequence; identical to SEQ ID NO: 953
  Synthetic polymer

SEQ ID NO: 2818 - DNA, 1475 bp, Artificial Sequence; identical to SEQ ID NO: 75
  Synthetic polymer

SEQ ID NO: 2819 - DNA, 1390 bp, Artificial Sequence; identical to SEQ ID NO: 184
  Synthetic polymer

SEQ ID NO: 2820 - DNA, 1441 bp, Artificial Sequence; identical to SEQ ID NO: 1030
  Synthetic polymer

SEQ ID NO: 2821 - DNA, 1377 bp, Artificial Sequence; identical to SEQ ID NO: 187
  Synthetic polymer

SEQ ID NO: 2822 - DNA, 1440 bp, Artificial Sequence; identical to SEQ ID NO: 981
  Synthetic polymer

SEQ ID NO: 2823 - DNA, 1379 bp, Artificial Sequence; identical to SEQ ID NO: 397
  Synthetic polymer

SEQ ID NO: 2824 - DNA, 1369 bp, Artificial Sequence; identical to SEQ ID NO: 575
  Synthetic polymer

SEQ ID NO: 2825 - DNA, 1374 bp, Artificial Sequence; identical to SEQ ID NO: 332
  Synthetic polymer

SEQ ID NO: 2826 - DNA, 1375 bp, Artificial Sequence; identical to SEQ ID NO: 411
  Synthetic polymer

SEQ ID NO: 2827 - DNA, 1358 bp, Artificial Sequence; identical to SEQ ID NO: 747
  Synthetic polymer

SEQ ID NO: 2828 - DNA, 1395 bp, Artificial Sequence
  Synthetic polymer
ttcgcccttagagtttgatcctggctcaggacgaacgctggcggcgtgcctaacacatgcaagtcgaacggaactgttttgaaagatttcttcggaatgaatttgatttagtttagtggcggacgggtgagtaacgcgtgagtaacctgccttcaagagggggataacattctgaaaagaatgctaataccgcatgacatatcggaaccacatggttttgatatcaaagattttatcgcttgaagatggactcgcgtccgattagttagttggtgaggtaacggctcaccaagaccgcgatcggtagccggactgagaggttgaacggccacattgggactgagacacggcccagactcctacgggaggcagcagtgggggatattgcgcaatgggggcaaccctgacgcagcaacgccgcgtgaaggatgaaggttttcggattgtaaacttcttttattaaggacgaaaaatgacggtacttaatgaataagctccggctaactacgtgccagcagccgcggtaatacgtagggagcaagcgttgtccggatttactgggtgtaaagggtgcgtaggcggattggcaagtcagaagtgaaatccatgggcttaacccatgaactgcttttgaaactgttagtcttgagtgaagtagaggtaggcggaattcccggtgtagcggtgaaatgcgtagagatcgggaggaacaccagtggcgaaggcggcctactgggctttaactgacgctgaggcacgaaagtgtgggtagcaaacaggattagataccctggtagtccacactgtaaacgatgattactaggtgtggggggtctaaccccctccgtgccggagttaacacaataagtaatccacctggggagtacgaccgcaaggttgaaactcaaaggaattgacgggggcccgtacaagcagtggagtatgtggtttaattcgacgcaacgcgaagaaccttaccaggtcttgacatccaactaacgaagcagagatgcattaggtgcccttcggggaaagttgagacaggtggtgcatggttgtcgtcagctcgtgtcgtgagatgttgggttaagtcccgcaacgagcgcaacccttgtgattagttgctacgcaagagcactctaatcagactgccgttgacaaaacggaggaaggtggggacgacgtcaaatcatcatgccctttatgacctgggctacacacgtactacaatggtcgttaacagagggaagcaataccgcgaggtggagcaaaaccctaaaaacggtctcagttcagattgtaggctgcaactcgcctacatgaagttggaattgctagtaatcgcggatcagcatgccgcggtgaatacgttcccgggccttgcacacaccgccc

SEQ ID NO: 2829 - DNA, 1463 bp, Artificial Sequence
  Synthetic polymer
gacgaacgctggcggcgtgcctaacacatgcaagtcgaacggagatacacgctgaaattgagacagcttgctgaggaaatttcttgtgtatcttagtggcggacgggtgagtaacgcgtgagtaacctgcctttcagagggggataacgttttgaaaagaacgctaataccgcataacacttttgaatcgcatgatataagagtcaaaggagcaatccgctgaaagatggactcgcgtccgattagatagttggtgaggtaacggcccaccaagtcgacgatcggtagccggactgagaggttgaatggccacattgggactgagacacggcccagactcctacgggaggcagcagtgaggaatattgggcaatgggggaaaccctgacccagcaacgccgcgtgagggaagacggttttcggattgtaaacctctgtcctctgtgaagataatgacggtagcagaggaggaagctccggctaactacgtgccagcagccgcggtaatacgtagggagcaagcgttgtccggatttactgggtgtaaagggtgcgtaggcggctatgcaagtcaggagtgaaatctatgggctcaacccataaactgcttttgaaactgtatagcttgagtgaagtagaggtaggcggaattcccggtgtagcggtggaatgcgtagagatcgggaggaacaccagtggcgaaggcggcctactgggctttaactgacgctgaggcacgaaagcgtgggtagcaaacaggattagataccctggtagtccacgctgtaaacgatgattactaggtgtgggggggtctgaccccttccgtgccggagttaacacaataagttaatccacctggggagtacgaccgcaaggttgaaactcaaaggaattgacggggggccccgcacaagcagtggagtatgtggtttaattcgaagcaacgcgaagaaccttaccaggtcttgacatggggatgaccgctctagagatagagctttccttcgggacatcccacacaggtggtgcatggttgtcgtcagctcgtgtcgtgagatgttgggttaagtcccgcaacgagcgcaacccttactgttagttgctacgcaagagcactctagcaggactgccgttgacaaaacggaggaaggtggggatgatgtcaaatcatcatgccccttatgacctgggctacacacgtactacaatggccgttaacaacgggaggcaaaacagtgatgtggagcaaaaccccaaaaacggtctcagttcggattgtaggctgcaactcgcctacatgaagttggaattgctagtaatcgcggatcagcatgccgcggtgaatacgttcccgggccttgtacacaccgcccgtcacaccatgggagccggtaatacccgaagtcagtagtctaaccgcaaggaggacgctgccgaaggtaggattggcgactggggtg

SEQ ID NO: 2830 - DNA, 1378 bp, Artificial Sequence; identical to SEQ ID NO: 358
  Synthetic polymer

SEQ ID NO: 2831 - DNA, 1523 bp, Artificial Sequence
  Synthetic polymer
atattttagagagtttgatcctggctcaggacgaacgctggcggcatgcctaacacatgcaagtcgaacggagtaagagagaagcttgcttagctcttacctagtggcggacgggtgagtaacgcgtgagtaacctgcctttcagagggggataacgttctgaaaagaacgctaataccgcatgatatattggggtcgcatggccttggtatcaaaggagcaatccgctgaaagatggactcgcgtccgattagccagttggcggggtaaaggcccaccaaagcgacgatcggtagccgggttgagagactgaacggccacattgggactgagacacggcccagactcctacgggaggcagcagtgggggatattgcacaatggaggaaactctgatgcagcaatgccgcgtgagggaagacggtcttcggattgtaaacctctgtccttggtgaagataatgacggtagccaaggaggaagctccggctaactacgtgccagcagccgcggtaatacgtagggagcaagcgttgtccggatttactgggtgtaaagggtgcgtaggcggctttttaagtcgggcgtgaaagctgtgggcttaacccacaaattgcgttcgaaactggaaggcttgagtgaagtagaggtaggcggaattcccggtgtagcggtgaaatgcgtagagatcgggaggaacaccagtggcgaaggcggcctactgggctttaactgacgctgaggcacgaaagcatgggtagcaaacaggattagataccctggtagtccatgccgtaaacgatgattactaggtgtggggggtctgaccccttccgtgccggagttaacacaataagtaatccacctggggagtacggccgcaaggttgaaactcaaaggaattgacgggggcccgcacaagcagtggagtatgtggtttaattcgaagcaacgcgaagaaccttaccaggtcttgacatccaactaacgaggcagagatgcattaggtgcccttcggggaaagttgagacaggtggtgcatggttgtcgtcagctcgtgtcgtgagatgttgggttaagtcccgcaacgagcgcaacccttgtgattagttgctacgcaagagcactctaatcagactgccgttgacaaaacggaggaaggtggggacgacgtcaaatcatcatgccccttatgacctgggctacacacgtactacaatggtcgctaacagagggaagccaagccgcgaggtggagcaaacccccaaaagcgatctcagttcggattgtaggctgcaacccgcctacatgaagttggaattgctagtaatcgcggatcagcatgccgcggtgaatacgttcccgggccttgtacacaccgcccgtcacaccatgggagccggtaatacccgaagccaatagtctaaccgcaagggggacgttgtcgaaggtaggattggcgactggggtgaagtcgtaacaaggtagccgtatcggaaggtgcggctggatcacctcctttct

SEQ ID NO: 2832 - DNA, 1376 bp, Artificial Sequence; identical to SEQ ID NO: 101
  Synthetic polymer

SEQ ID NO: 2833 - DNA, 1383 bp, Artificial Sequence; identical to SEQ ID NO: 574
  Synthetic polymer

SEQ ID NO: 2834 - DNA, 1402 bp, Artificial Sequence; identical to SEQ ID NO: 548
  Synthetic polymer

SEQ ID NO: 2835 - DNA, 1393 bp, Artificial Sequence
  Synthetic polymer
agagtttgatcctggctcaggatgaacgctggcggcgtgcctaacacatgcaagtcgaacggaacttctttgacagaattctacggaaggaagttgattaagtttagtggcggacgggtgagtaacgcgtgagtaacctgcctttgagaggggaataacttcccgaaagggatgctaataccgcatgacgcatatttatcgcatggtagatatgccaaagatttatcgctcaaagatggactcgcgtccgattagccagttggcggggtaacggcccaccaaagcgacgatcggtagccggactgagaggttgaacggccacattgggactgagacacggcccagactcctacgggaggcagcagtgggggatattgcgcaatgggggaaaccctgacgcagcaacgccgcgtgaaggatgaaggttttcggattgtaaacttcttttatttaggacgaagaatgacggtactaaatgaataagctccggctaactacgtgccagcagccgcggtaatacgtagggagcaagcgttatccggatttactgggtgtaaagggtgcgtaggcggcttggtaagtcagatgtgaaatgtatgggctcaacccatgcactgcatttgaaactattgagcttgagtgaagtagaggtaggcggaattccctgtgtagcggtgaaatgcgtagagatagggaggaacaccagtggcgaaggcggcctactggggctttaactgacgctgaggcacgaaagcgtgggtagcaaacaggattagataccctggtagtccacgctgtaaacgatgattactaggtgtggggggtctgaccccttccgtgccggagttaacacaataagtaatccacctggggagtacgaccgcaaggttgaaactcaaaggaattgacggggacccgcacaagcggtggagcatgtggtttaattcgaagcaacgcgaagaaccttaccaagtcttgacatccgcctgaccgatccttaaccggatctttccttcgggacaggcgagacaggtggtgcatggttgtcgtcagctcgtgtcgtgagatgttgggttaagtcccgcaacgagcgcaacccctatcctcagtagccagcatttaaggtgggcactctggggagactgccagggataacctggaggaaggcggggatgacgtcaaatcatcatgccccttatgacctgggctacacacgtactacaatggatgtaaacagagggaagcaaaatagcgatatggagcaaaccccaaaaagcattctcagttcagattgcaggctgcaactcgcctgtatgaagttggaattgctagtaatcgcggatcagcatgccgcggtgaatacgttcccgggccttgcacacaccgcccgtca

SEQ ID NO: 2836 - DNA, 1350 bp, Artificial Sequence; identical to SEQ ID NO: 852
  Synthetic polymer

SEQ ID NO: 2837 - DNA, 1375 bp, Artificial Sequence; identical to SEQ ID NO: 181
  Synthetic polymer

SEQ ID NO: 2838 - DNA, 1342 bp, Artificial Sequence; identical to SEQ ID NO: 289
  Synthetic polymer

SEQ ID NO: 2839 - DNA, 1388 bp, Artificial Sequence; identical to SEQ ID NO: 286
  Synthetic polymer

SEQ ID NO: 2840 - DNA, 1423 bp, Artificial Sequence; identical to SEQ ID NO: 1062
  Synthetic polymer

SEQ ID NO: 2841 - DNA, 1482 bp, Artificial Sequence
  Synthetic polymer
  misc_feature (559)..(559): n is a, c, g, or t
caggatgaacgctggcggcatgcctaacacatgcaagtcgaacggagttattagacggaagccttcgggtggaagattaataacttagtggcggacgggtgagtaacgcgtgagtaacctgcctctcagagggggataacgttctgaaaagaacgctaataccgcatataatcaagaaaccgcatgattttttgatgaaaggagcaatccgctgagagatggactcgcgtctgattagctagatggtggggtaacggcctaccatggcgacgatcagtagccggactgagaggttgaacggccacattgggactgagacacggcccagactcctacgggaggcagcagtgggggatattgcgcaatgggggaaaccctgacgcagcaatgccgcgtgaaggaagaaggttttcggattgtaaacttcttttgttaaggacgaagaatgacggtacttaacgaataagctccggctaactatgtgccagcagccgcggtaatacatagggagcaagcgttatccggatttactgggtgtaaagggtgcgtaggcggctangcaagtcagatgtgaaatacacgggctcaacccgtgagctgcatttgaaactgtttagcttgagtgaagtagaggcaggcggaattcccggtgtagcggtgaaatgcgtagagatcgggaggaacaccagtggcgaaggcggcctgctgggctttaactgacgctgaggcacgaaagcgtgggtagcaaacaggattagataccctggtagtccacgctgtaaacgatgattactaggtgtgggtggactgaccccatccgtgccgmagttaacacaataagtaatccacctggggagtacgaccgcaaggttgaaactcaaaggaattgacgggggcccgcacaagcagtggagtatgtggtttaattcgaagcaacgcgaagaaccttaccaggtcttgacatccaactaacgaagtagagatacattaggtgcccttcggggaaagttgagacaggtggtgcatggttgtcgtcagctcgtgtcgtgagatgttgggttaagtcccgcaacgagcgcaacccttgctattagttgctacgcaagagcactctaataggactgccgttgacaaaacggaggaaggtggggacgacgtcaaatcatcatgccccttatgacctgggctacacacgtactacaatggccataaacaaagggaagcaaagccgcgaggtggagcaaacccccaaaaatggtcccagttcggattgtaggctgcaacccgcctatatgaagttggaattgctagtaatcgtggatcagaatgccacggtgaatacgttcccgggccttgtacacaccgcccgtcacaccatgggagccggtaatacccgaagtcagtagtctaaccgcaaggaggacgytgccgaargtaggattggcgactggggtgaagtcgwaacaaggtagccgtatcgga

SEQ ID NO: 2842 - DNA, 1376 bp, Artificial Sequence; identical to SEQ ID NO: 320
  Synthetic polymer

SEQ ID NO: 2843 - DNA, 1479 bp, Artificial Sequence; identical to SEQ ID NO: 914
  Synthetic polymer

SEQ ID NO: 2844 - DNA, 1396 bp, Artificial Sequence
  Synthetic polymer
ttcgcccttagagtttgatcctggctcaggacgaacgctggcggcgtgcttaacacatgcaagtcgaacggagtgctccggaaagagatttcggtcaatggatggagttacttagtggcggacgggtgagtaacgcgtgaggaacctgcctttcagagggggacaacagttggaaacgactgctaataccgcataacgcatgggtatcgcatggtatctgtgccaaagatttatcgctgagagatggcctcgcgtctgattagctagttggtgaggtaacggcccaccaaggcgacgatcggtagccggactgagaggttgaacggccacattgggactgagacacggcccagactcctacgggaggcagcagtgagggatattggtcaatgggggaaaccctgaaccagcaacgccgcgtgagggaagacggttttcggattgtaaacctctgtcctctgtgaagataatgacggtagcagaggaggaagctccggctaactacgtgccagcagccgcggtaatacgtagggagcaagcgttgtccggatttactgggtgtaaagggtgcgtaggcgggcttgcaagtcagaagtgaaatctatgggcttaacccataaactgcttttgaaactgtaagtcttgagtgaagtagaggtaggcggaattcccggtgtagcggtgaaatgcgtagagatcgggaggaacaccagtggcgaaggcggcctgctggacgacaactgacggtgaggcgcgaaagcgtggggagcaaacaggattagataccctggtagtccacgctgtaaacgatggatactaggtgtgcggggactgaccccctgcgtgccgcagttaacacaataagtatcccacctggggagtacgatcgcaaggttgaaactcaaaggaattgacgggggcccgcacaagcggtgggttatgtggtttaattcgatgcaacgcgaagaaccttaccagggcttgacatcctgctaacgaggtagagatacgtcaggtgcccttcggggaaagcagagacaggtggtgcatggttgtcgtcagctcgtgtcgtgagatgttgggttaagtcccgcaacgagcgcaacccttattgttagttgctacgcaagagcactctagcgagactgccgttgacgaaacggaggaaggtggggacgacgtcaaatcatcatgccccttatgtcctgggctacacacgtaatacaatggcggtaaacagagggatgcaaaactgcgaagtggagcgaacccctaaaagccgtcccagttcagattgcagtctgcaactcgactgcatgaagtcggaatcgctagtaatcgcggatcagcatgccgcggtgaatacgttcccgggccttgcactcaccgcccgtca

SEQ ID NO: 2845 - DNA, 1429 bp, Artificial Sequence; identical to SEQ ID NO: 1081
  Synthetic polymer

SEQ ID NO: 2846 - DNA, 1369 bp, Artificial Sequence; identical to SEQ ID NO: 570
  Synthetic polymer

SEQ ID NO: 2847 - DNA, 1391 bp, Artificial Sequence; identical to SEQ ID NO: 351
  Synthetic polymer

SEQ ID NO: 2848 - DNA, 1368 bp, Artificial Sequence; identical to SEQ ID NO: 64
  Synthetic polymer

SEQ ID NO: 2849 - DNA, 1368 bp, Artificial Sequence; identical to SEQ ID NO: 666
  Synthetic polymer

SEQ ID NO: 2850 - DNA, 1391 bp, Artificial Sequence; identical to SEQ ID NO: 194
  Synthetic polymer

SEQ ID NO: 2851 - DNA, 1490 bp, Artificial Sequence; identical to SEQ ID NO: 525
  Synthetic polymer

SEQ ID NO: 2852 - DNA, 1375 bp, Artificial Sequence; identical to SEQ ID NO: 900
  Synthetic polymer

SEQ ID NO: 2853 - DNA, 1349 bp, Artificial Sequence; identical to SEQ ID NO: 315
  Synthetic polymer

SEQ ID NO: 2854 - DNA, 1404 bp, Artificial Sequence; identical to SEQ ID NO: 307
  Synthetic polymer

SEQ ID NO: 2855 - DNA, 1396 bp, Artificial Sequence; identical to SEQ ID NO: 117
  Synthetic polymer

SEQ ID NO: 2856 - DNA, 1483 bp, Artificial Sequence
  Synthetic polymer
tggctcaggacgaacgctggcggcgtgcctaacacatgcaagtcgaacggagatattcgctgatgaagtacttcggtaatgattcttgaatatcttagtggcggacgggtgagtaacgcgtgagcaacctgcctttcagagggggataacgttcggaaacgaacgctaataccgcatgacattgttgagtcgcatgacatgacaatcaaaggagcaatccgctgaaagatgggctcgcgtccgattaggtagttggtggggcaacggcccaccaagccgacgatcggtagccggactgagaggttgaacggccacattgggactgagacacggcccagactcctacgggaggcagcagtgagggatattggtcaatgggggaaaccctgaaccagcaacgccgcgtgagggaagacggttttcggattgtaaacctctgtcctctgtgaagataatgacggtagcagaggaggaagctccggctaactacgtgccagcagccgcggtaatacgtagggagcaagcgttgtccggatttactgggtgtaaagggtgcgtaggcggctttgcaagtcagaagtgaaatccatgggcttaacccatgaactgcttttgaaactgcagagcttgagtggagtagaggtaggcggaattcccggtgtagcggtgaaatgcgtagagatcgggaggaacaccagtggcgaaggcggcctactgggctctaactgacgctgaggcacgaaagcgtgggtagcaaacaggattagataccctggtagtccacgctgtaaacgatgattactaggtgtgggtggactgaccccatccgtgccggagttaacacaataagtaatccacctggggagtacgaccgcaaggttgaaactcaaaggaattgacgggggcccgcacaagcagtggagtatgtggattaattcgatgcaacgcgaagaaccttaccaggtcttgacatcccgctaacgaagtagagatacattaggtgcccttcggggaaagcggagacaggtggtgcatggttgtcgtcagctcgtgtcgtgagatgttgggttaagtcccgcaacgagcgcaacccttactgttagttgctacgcaagagcactctagcaggaccgccgttgacaaaacggaggaaggtggggatgatgtcaaatcatcatgccccttatgacctgggcctcacacgtactacaatggccatcaacagagggaagcaaagccgcgaggcagagcaaaaccctaaaaatggtctcagttcggatcgtaggctgaaacccgcctgcgtgaagttggaattgctagtaatcgcggatcagcatgccgcggtgaatacgttcccgggccttgtacacaccgcccgtcacaccatgggagccggtaatgcccgaagtcagtagcctaaccgcaaggagggcgctgccgaaggtaggattggcgactggggtgaagtcgtaacaaggtaacc

SEQ ID NO: 2857 - DNA, 1447 bp, Artificial Sequence; identical to SEQ ID NO: 1111
  Synthetic polymer

SEQ ID NO: 2858 - DNA, 1347 bp, Artificial Sequence
  Synthetic polymer
agtcgaacggagaattttggattttttcgagattcttagtggcggacgggtgagtaacacgtgagtaacctgcctctgagagagggatagcttctggaaacggatggtaataccttcataacataacttaaaggcatctttaagttatcaaagatttatcgctcagagatggactcgcgtctgattaggtagttggtgaggtaacggctcaccaagccgacgatcagtagccggactgagaggttgaacggccacattgggactgagacacggcccagactcctacgggaggcagcagtggggaatattgcacaatggggggaaccctgatgcagcgatgccgcgtggaggaagaaggttttcggattgtaaactcctgtcttaaaggacgataatgacggtactttaggaggaagctccggctaactacgtgccagcagccgcggtaatacgtagggagcgagcgttgtccggaattactgggtgtaaagggagcgtaggcgggattgcaagtcagatgtgaaaactatgggcttaacccatagactgcatttgaaactgtagttcttgagtgaagtagaggtaagcggaattcctggtgtagcggtgaaatgcgtagatatcaggaggaacaccggtggcgaaggcggcttactgggcttttactgacgctgaggctcgaaagcgtggggagcaaacaggattagataccctggtagtccacgctgtaaacgatgattactaggtgtggggggactgaccccttccgtgccgcagttaacacaataagtaatccacctggggagtacggccgcaaggttgaaactcaaaggaattgacgggggcccgcacaagcagtggagtatgtggtttaattcgaagcaacgcgaagaaccttaccaggtcttgacatcgagtgcataactaagagattagtgaaattccttcgggaacacttagacaggtggtgcatggttgtcgtcagctcgtgtcgtgagatgttgggttaagtcccgcaacgagcgcaacccttacctttagttgctacgcaagagcactctaaagggactgccgttgacaaaacggaggaaggtggggatgacgtcaaatcatcatgccccttatgacctgggctacacacgtactacaatggcaatcaacaaagagaagcaagacagtgatgtggagcgaatctcaaaaaattgtcccagttcggattgcgggctgcaactcgcctgcatgaagtcggaattgctggtaatcgcggatcagcatgccgcggtgaatacgttcccgggccttgtacacaccgcccgtcacaccatgggagtcggtaacacccgaagt

SEQ ID NO: 2859 - DNA, 1354 bp, Artificial Sequence; identical to SEQ ID NO: 304
  Synthetic polymer

SEQ ID NO: 2860 - DNA, 1459 bp, Artificial Sequence; identical to SEQ ID NO: 928
  Synthetic polymer

SEQ ID NO: 2861 - DNA, 1375 bp, Artificial Sequence; identical to SEQ ID NO: 446
  Synthetic polymer

SEQ ID NO: 2862 - DNA, 1405 bp, Artificial Sequence; identical to SEQ ID NO: 443
  Synthetic polymer

SEQ ID NO: 2863 - DNA, 1497 bp, Artificial Sequence; identical to SEQ ID NO: 886
  Synthetic polymer

SEQ ID NO: 2864 - DNA, 1399 bp, Artificial Sequence
  Synthetic polymer
agagtttgatcctggctcaggacgaacgctggcggcgtgcctaacacatgcaagtcgaacggggcttgttatccagaatttttcggaaggacggagaacaaggctagtggcggacgggtgagtaacgcgtgagtaacctgcctttcagagggggataacgttctgaaaaggacgctaataccgcataacatatagaggtcgcatggcagctatatcaaaggagcaatccgctgagagatggactcgcgtctgattagatagttggtggggtaacggcctaccaagtcgacgatcagtagccggactgagaggttgaacggccacattgggactgagacacggcccagactcctacgggaggcagcagtgggggatattgcgcaatgggggaaaccctgacgcagcaacgccgcgtgaaggaagaaggttttcggattgtaaacttcttttgtcagggacgaatagatgacggtacctgacgaataagctccggctaactacgtgccagcagccgcggtaatacgtagggagcgagcgttgtccggaattactgggtgtaaagggtgcgtaggcggcagagcaagtcagatgtgaaatacacgggcttaacccgtgggctgcatttgaaactgttcagcttgagtgaagcagaggcaggcggaattcccggtgtagcggtgaaatgcgtagagatcgggaggaacaccagtggcgaaggcggcctgctgggctttaactgacgctgaggcacgaaagcgtgggtagcaaacaggattagataccctggtagtccacgctgtaaacgatgattaatatggggggtggggtctagcccccctccgtgccccagttaacacaataagtatcccaccgggggagtacgttcgcaaaggttgaaaactcaaaggaattgacgggggcccgcacaagcggtggagtatgtggtttaattcgaagcaacgagaagaaccttaccaggacttgccatcgtactaacgagacagagatgtattaggtgcccttcggggaaagtagagacaggtggtgcaatggttgtcgtcagctcgtgtcgtgagatgttgggttaagtcccgcaacgagcgcaacccttattgttagttgttacgcaagagcactctagcgagactgccgttgacaaaacggaggaaggtggggaggacgtcaaatcatcatgccccctatgtcttgggccacacacgtactacaatggcggtcaacaagagggaagcaatatcgcgagatggagcaaatccctaaaagccgtcccagttcggattgcaggctgaaactcgcctgtatgaagtcggaatcgctatgtaatcgcggatcagcatgccgcggtgaatacgttcccgggccttgcacacaccgcccgtca

SEQ ID NO: 2865 - DNA, 1399 bp, Artificial Sequence; identical to SEQ ID NO: 199
  Synthetic polymer

SEQ ID NO: 2866 - DNA, 1343 bp, Artificial Sequence; identical to SEQ ID NO: 267
  Synthetic polymer

SEQ ID NO: 2867 - DNA, 1503 bp, Artificial Sequence; identical to SEQ ID NO: 67
  Synthetic polymer

SEQ ID NO: 2868 - DNA, 1439 bp, Artificial Sequence; identical to SEQ ID NO: 1115
  Synthetic polymer

SEQ ID NO: 2869 - DNA, 1375 bp, Artificial Sequence; identical to SEQ ID NO: 223
  Synthetic polymer

SEQ ID NO: 2870 - DNA, 1388 bp, Artificial Sequence; identical to SEQ ID NO: 825
  Synthetic polymer
  misc_feature (779)..(779): n is a, c, g, or t

SEQ ID NO: 2871 - DNA, 1469 bp, Artificial Sequence; identical to SEQ ID NO: 912
  Synthetic polymer

SEQ ID NO: 2872 - DNA, 1389 bp, Artificial Sequence
  Synthetic polymer
agagtttgatcctggctcaggacgaacgctggcggcgtgcctaacacatgcaagtcgaacggaactgttttgaaagatttcttcggaatgaatttgatttagtttagtggcggacgggtgagtaacgcgtgagtaacctgccttcaagagggggataacattctgaaaagaatgctaataccgcatgacatatcggaatcacatggttttgatatcaaagattttatcgcttgaagatggactcgcgtccgattagttagttggtgaggtaacggctcaccaagaccgcgatcggtagccggactgagaggttgaacggccacattgggactgagacacggcccagactcctacgggaggcagcagtgagggatattggtcaatgggggaaaccctgaaccagcaacgccgcgtgagggatgacggccttcgggttgtaaacctctgtcctctgtgaagataatgacggtagcagaggaggaagctccggctaactacgtgccagcagccgcggtaatacgtagggagcaagcgttgtccggatttactgggtgtaaagggtgcgtaggcggtttggtaagtcagaagtgaaatccatgggcttaacccatgaactgcttttgaaactatcgaacttgagtgaagtagaggtaggcggaattcccggtgtagcggtgaaatgcgtagagatcgggaggaacaccagtggcgaaggcggcctactgggctttaactgacgctgaggcacgaaagcatgggtagcaaacaggattagataccctggtagtccatgccgtaaacgatgattactaggtgtggggggtctgaccccctccgtgccggagttaacacaataagtaatccacctggggagtacgaccgcaaggttgaaactcaaaggaattgacgggggcccgcacaagcagtggagtatgtggattaattcgaagcaacgcgaagaaccttaccaggtcttgacatccagctaacgaagtagagatacattaggtgcccttcggggaaagctgagacaggtggtgcatggttgtcgtcagctcgtgtcgtgagatgttgggttaagtcccgcaacgagcgcaacccttactgttagttgctacgcaagagcactctagcaggaccgccgttgacaaaacggaggaaggtggggatgatgtcaaatcatcatgccccttatgacctgggcctcacacgtactacaatggccgtaaacagagggaagcaataccgcgaggtggagcaaaaccctaaaaacggtcccagttcggattgcaggctgcaacccgcctgcatgaagttggaattgctagtaatcgcggatcagcatgccgcggtgaatacgttcccgggccttgtactcaccgcccgtca

SEQ ID NO: 2873 - DNA, 1485 bp, Artificial Sequence; identical to SEQ ID NO: 469
  Synthetic polymer

SEQ ID NO: 2874 - DNA, 1379 bp, Artificial Sequence
  Synthetic polymer
agagtttgatcctggctcaggacgaacgctggcggcgcgcctaacacatgcaagtcgaacgagcgagatagagcttgctttctcgagcgagtggcgaacgggtgagtaacgcgtgaggaacctgcctcaaagagggggacaacagttggaaacgactgctaataccgcataagcccacggctcggcatcgagcagagggaaaaggagcaatgccgtctgagagatggactcgcgtctgattagccagttggcggggtaacggcccaccaaagcaacgatcggtagccggactgagaggttgaacggccacattgggactgagacacggcccagactcctaccggaggcagcagtgggggatattgcacaatgggggaaaccctgatgcagcaacgccgcgtgaaggatgaaggtcttcggattgtaaacttttgtcctatgggaagaagaaagtgacggtaccataggaggaagctccggctaactacgtgccagcagccgcggtaatacgtagggagcaagcgttgtccggatttactgggtgtaaagggtgcgtaggcggaagagcaagtcagtagtgaaatctgggggcttaacccccaaactgctattgaaactgtttttcttgagtggagtagaggtaggcggaattcccggtgtagcggtgaaatgcgtagagatcgggaggaacaccagtggcgaaggcggcctactgggctctaactgacgctgaggcacgaaagtgtgggtagcaaacaggattagataccctggtagtccacaccgtaaacgatgattactaggtgtggggggtctgaccccctccgtgccggagttaacacaataagtaatccacctggggagtacggccgcaaggttgaaactcaaaggaattgacgggggcccgcacaagcagtggagtatgtggtttaattcgaagcaacgcgaagaaccttaccaggtcttgacatccaactaacgaagcagagatgcatcaggtgcccttcggggaaagttgagacaggtggtgcatggttgtcgtcagctcgtgtcgtgagatgttgggttaagtcccgcaacgagcgcaacccttgtgattagttgctacgcaagagcactctaatcagactgccgttgacaaaacggaggaaggtggggacgacgtcagatcatcatgccccttatgtcctgggctacacacgtaatacaatggcggtcaacagagggatgcaaaaccgtagggtggagcgaacccctaaaagccgtctcagttcagattgtgggctgcaacccgcccacatgaagtcggaatcgctagtaatcgcggatcagcatgccgcggtgaatacgttcccgggccttgtacacaccgcccgtca

SEQ ID NO: 2875 - DNA, 1370 bp, Artificial Sequence; identical to SEQ ID NO: 467
  Synthetic polymer

SEQ ID NO: 2876 - DNA, 1466 bp, Artificial Sequence; identical to SEQ ID NO: 498
  Synthetic polymer

SEQ ID NO: 2877 - DNA, 1494 bp, Artificial Sequence; identical to SEQ ID NO: 88
  Synthetic polymer

SEQ ID NO: 2878 - DNA, 1379 bp, Artificial Sequence; identical to SEQ ID NO: 382
  Synthetic polymer

SEQ ID NO: 2879 - DNA, 1379 bp, Artificial Sequence; identical to SEQ ID NO: 780
  Synthetic polymer

SEQ ID NO: 2880 - DNA, 1475 bp, Artificial Sequence; identical to SEQ ID NO: 485
  Synthetic polymer

SEQ ID NO: 2881 - DNA, 1528 bp, Artificial Sequence; identical to SEQ ID NO: 19
  Synthetic polymer
  misc_feature (1118)..(1118): n is a, c, g, or t

SEQ ID NO: 2882 - DNA, 1387 bp, Artificial Sequence; identical to SEQ ID NO: 98
  Synthetic polymer

SEQ ID NO: 2883 - DNA, 1401 bp, Artificial Sequence; identical to SEQ ID NO: 321
  Synthetic polymer

SEQ ID NO: 2884 - DNA, 1364 bp, Artificial Sequence; identical to SEQ ID NO: 1191
  Synthetic polymer

SEQ ID NO: 2885 - DNA, 1363 bp, Artificial Sequence; identical to SEQ ID NO: 1192
  Synthetic polymer
  misc_feature (2)..(2): n is a, c, g, or t

SEQ ID NO: 2886 - DNA, 1498 bp, Artificial Sequence; identical to SEQ ID NO: 8
  Synthetic polymer

SEQ ID NO: 2887 - DNA, 1482 bp, Artificial Sequence; identical to SEQ ID NO: 1214
  Synthetic polymer

SEQ ID NO: 2888 - DNA, 1363 bp, Artificial Sequence; identical to SEQ ID NO: 1217
  Synthetic polymer

SEQ ID NO: 2889 - DNA, 1436 bp, Artificial Sequence; identical to SEQ ID NO: 54
  Synthetic polymer
  misc_feature (193)..(193): n is a, c, g, or t
  misc_feature (443)..(443): n is a, c, g, or t
  misc_feature (1337)..(1337): n is a, c, g, or t

SEQ ID NO: 2890 - DNA, 1408 bp, Artificial Sequence; identical to SEQ ID NO: 56
  Synthetic polymer

SEQ ID NO: 2891 - DNA, 1416 bp, Artificial Sequence; identical to SEQ ID NO: 1237
  Synthetic polymer

SEQ ID NO: 2892 - DNA, 1504 bp, Artificial Sequence; identical to SEQ ID NO: 1238
  Synthetic polymer

SEQ ID NO: 2893 - DNA, 1424 bp, Artificial Sequence; identical to SEQ ID NO: 1246
  Synthetic polymer

SEQ ID NO: 2894 - DNA, 1456 bp, Artificial Sequence; identical to SEQ ID NO: 1259
  Synthetic polymer

SEQ ID NO: 2895 - DNA, 1498 bp, Artificial Sequence; identical to SEQ ID NO: 1274
  Synthetic polymer

SEQ ID NO: 2896 - DNA, 1467 bp, Artificial Sequence; identical to SEQ ID NO: 1283
  Synthetic polymer

SEQ ID NO: 2897 - DNA, 1391 bp, Artificial Sequence; identical to SEQ ID NO: 1300
  Synthetic polymer
  misc_feature (29)..(34): n is a, c, g, or t
  misc_feature (1343)..(1343): n is a, c, g, or t
  misc_feature (1360)..(1360): n is a, c, g, or t
  misc_feature (1384)..(1386): n is a, c, g, or t

SEQ ID NO: 2898 - DNA, 1364 bp, Artificial Sequence; identical to SEQ ID NO: 1301
  Synthetic polymer

SEQ ID NO: 2899 - DNA, 1503 bp, Artificial Sequence; identical to SEQ ID NO: 1318
  Synthetic polymer

SEQ ID NO: 2900 - DNA, 1439 bp, Artificial Sequence; identical to SEQ ID NO: 1326
  Synthetic polymer

SEQ ID NO: 2901 - DNA, 1431 bp, Artificial Sequence; identical to SEQ ID NO: 1328
  Synthetic polymer

SEQ ID NO: 2902 - DNA, 1377 bp, Artificial Sequence; identical to SEQ ID NO: 1335
  Synthetic polymer

SEQ ID NO: 2903 - DNA, 1479 bp, Artificial Sequence; identical to SEQ ID NO: 1351
  Synthetic polymer
  misc_feature (303)..(303): n is a, c, g, or t

SEQ ID NO: 2904 - DNA, 1372 bp, Artificial Sequence; identical to SEQ ID NO: 889
  Synthetic polymer

SEQ ID NO: 2905 - DNA, 1508 bp, Artificial Sequence; identical to SEQ ID NO: 1382
  Synthetic polymer

SEQ ID NO: 2906 - DNA, 1413 bp, Artificial Sequence; identical to SEQ ID NO: 1409
  Synthetic polymer

SEQ ID NO: 2907 - DNA, 1415 bp, Artificial Sequence; identical to SEQ ID NO: 1417
  Synthetic polymer
  misc_feature (6)..(6): n is a, c, g, or t
  misc_feature (19)..(19): n is a, c, g, or t
  misc_feature (501)..(501): n is a, c, g, or t
  misc_feature (504)..(504): n is a, c, g, or t
  misc_feature (531)..(531): n is a, c, g, or t

SEQ ID NO: 2908 - DNA, 1410 bp, Artificial Sequence; identical to SEQ ID NO: 1419
  Synthetic polymer

SEQ ID NO: 2909 - DNA, 1416 bp, Artificial Sequence; identical to SEQ ID NO: 1439
  Synthetic polymer

SEQ ID NO: 2910 - DNA, 1363 bp, Artificial Sequence; identical to SEQ ID NO: 1448
  Synthetic polymer

SEQ ID NO: 2911 - DNA, 1507 bp, Artificial Sequence; identical to SEQ ID NO: 1449
  Synthetic polymer

SEQ ID NO: 2912 - DNA, 1381 bp, Artificial Sequence; identical to SEQ ID NO: 901
  Synthetic polymer

SEQ ID NO: 2913 - DNA, 1442 bp, Artificial Sequence; identical to SEQ ID NO: 1092
  Synthetic polymer

SEQ ID NO: 2914 - DNA, 1452 bp, Artificial Sequence; identical to SEQ ID NO: 935
  Synthetic polymer

SEQ ID NO: 2915 - DNA, 1496 bp, Artificial Sequence; identical to SEQ ID NO: 491
  Synthetic polymer

SEQ ID NO: 2916 - DNA, 1379 bp, Artificial Sequence; identical to SEQ ID NO: 893
  Synthetic polymer

SEQ ID NO: 2917 - DNA, 1454 bp, Artificial Sequence
  Synthetic polymer
tcagattgaacgctggcggcatgctttacacatgcaagtcgaacggcagcacagggagcttgctcccgggtggcgagtggcgcacgggtgagtaatacatcggaacgtgtcctatcgtgggggataactgatcgaaaggttagctaataccgcataagacctgagggtgaaagcaggggatcgcaagaccttgcgcgattggagcggccgatggccgattagctagttggtgaggtaaaggctcaccaaggcgacgatcggtagctggtctgagaggacgaccagccacattgggactgagacacggcccaaactcctacgggaggcagcagtggggaattttggacaatgggggcaaccctgatccagccatgccgcgtgcaggatgaaggtcttcggattgtaaactgcttttgtcagggacgaaaaggattccgctaatatcgggatctgctgacggtacctgaagaataagcaccggctaactacgtgccagcagccgcggtaatacgtagggtgcaagcgttaatcggaattactgggcgtaaagcgtgcgcaggcggttctgtaagacggatgtgaaatccccgggctcaacctgggaattgcattcgtgactgcaggactagagtccatcagagggaggtggaattccaagtgtagcagtgaaatgcgtagatatttggaagaacaccaatggcgaaggcagcctcctgggatgtcactgacgctcatgcacgaaagcgtggggagcaaacaggattagataccctggtagtccacgccctaaacgatgtctactggttgttggggatttaatatccttggtaacgaagctaacgcgtgaagtagaccgcctggggagtacggtcgcaagattaaaactcaaaggaattgacggggacccgcacaagcggtggatgatgtggattaattcgatgcaacgcgaaaaaccttacctagccttgacatgtcgagaacctttcagagatgagagggtgcccgcaagggaattcgaacacaggtgctgcatggctgtcgtcagctcgtgtcgtgagatgttgggttaagtcccgcaacgagcgcaacccttgtcactagttgctacgcaagagcactctagtgagactgccggtgacaaaccggaggaaggtggggatgacgtcaagtcctcatggcccttatggctagggcctcacacgtcatacaatggtcggaacagagggcagcgaagccgcgaggtggagcaaatcccagaaaaccgatcgtagtccggattggagtctgcaactcgactccatgaagtcggaatcgctagtaatcgcggatcagcatgccgcggtgaatacgttcccgggtcttgtacacaccgcccgtcacaccatgggagtggggttcaccagaagacgtttgtctaaccgcaaggaggacggcgtccacggtgggtttcatga

SEQ ID NO: 2918 - DNA, 1448 bp, Artificial Sequence; identical to SEQ ID NO: 976
  Synthetic polymer

SEQ ID NO: 2919 - DNA, 1434 bp, Artificial Sequence; identical to SEQ ID NO: 1125
  Synthetic polymer

SEQ ID NO: 2920 - DNA, 1394 bp, Artificial Sequence; identical to SEQ ID NO: 696
  Synthetic polymer

SEQ ID NO: 2921 - DNA, 1452 bp, Artificial Sequence; identical to SEQ ID NO: 1007
  Synthetic polymer

SEQ ID NO: 2922 - DNA, 1458 bp, Artificial Sequence; identical to SEQ ID NO: 62
  Synthetic polymer

SEQ ID NO: 2923 - DNA, 1458 bp, Artificial Sequence; identical to SEQ ID NO: 1008
  Synthetic polymer

SEQ ID NO: 2924 - DNA, 1392 bp, Artificial Sequence; identical to SEQ ID NO: 591
  Synthetic polymer

SEQ ID NO: 2925 - DNA, 1430 bp, Artificial Sequence
  Synthetic polymer
gctttacacatgcaagtcgaacggtaacgcggagggaagcttgcttctctccggcgacgagtggcgaacgggtgagtaatacatcggaacgtgtccgctcgtgggggacaaccagccgaaaggttggctaataccgcatgagttctacggaagaaagagggggacccgcaagggcctctcgcgagcggagcggccgatgactgattagcctgttggtgaggtaacggctcaccaaagcaacgatcagtagctggtctgagaggacgaccagccacactgggactgagacacggcccagactcctacgggaggcagcagtggggaattttggacaatgggcgcaagcctgatccagctattccgcgtgtgggatgaaggccctcgggttgtaaatcacttttgtagagaacgaaaagacatcttcgaataaaggatgttgctgacggtactctaagaataagcaccggctaactacgtgccagcagccgcggtaatacgtagggtgcgagcgttaatcggaattactgggcgtaaagggtgcgcaggcggttgagtaagacagatgtgaaatccccgagcttaactcgggaatggcatatgtgactgctcgactagagtgtgtcagagggaggtggaattccacgtgtagcagtgaaatgcgtagatatgtggaagaacaccgatggcggaggcagcctcctgggacataactgacgctcaggcacgaaagcgtggggagcaaacaggattagataccctggtagtccacgccctaaacgatgttaactagttgttgggatgtaacaatctcagtaacgcagccaacgcgagaagttaaccgcctgggaagtacggtcgcaagactaaaactcaaaggaattgacggggacccgcacaagcggtggatgatgtggattaattcgatgcaacgcgaaaaaccttacctacccttgacatgtcaggaagctcttgtaatgagagcgtgcccgcaagggagcctgaacacaggtgctgcatggctgtcgtcagctcgtgtcgtgagatgttgggttaagtcccgcaacgagcgcaacccttgtcactagttgctacgaaagggcactctagtgagactgccggtgacaaaccggaggaaggtggggatgacgtcaagtcctcatggcccttatgggtagggcttcacacgtcatacaatggtcggaacagagggcagcgaagccgtgaggcggagccaatcccagaaaaccgatcgtagtccggattgcagtctgcaactcgactgcatgaagtcggaatcgctagtaatcgcgcatcagccatggcgcggtgaatacgttcccgggccttgtacacaccgcccgtcaagccatgggagccgggggtacctgaagtccgtaacagggaggatcggcctagggtaaaactggtga

SEQ ID NO: 2926 - DNA, 1449 bp, Artificial Sequence; identical to SEQ ID NO: 1066
  Synthetic polymer

SEQ ID NO: 2927 - DNA, 1447 bp, Artificial Sequence; identical to SEQ ID NO: 1124
  Synthetic polymer

SEQ ID NO: 2928 - DNA, 1443 bp, Artificial Sequence; identical to SEQ ID NO: 943
  Synthetic polymer

SEQ ID NO: 2929 - DNA, 1506 bp, Artificial Sequence; identical to SEQ ID NO: 911
  Synthetic polymer

SEQ ID NO: 2930 - DNA, 1396 bp, Artificial Sequence
  Synthetic polymer
agagtttgatcctggctcagattgaacgctggcggcatgctttacacatgcaagtcgaacggcagcacagggagcttgctcccgggtggcgagtggcgcacgggtgagtaatacatcggaacgtgtcctgttgtgggggataactgctcgaaagggtggctaataccgcatgagacctgagggtgaaagcgggggatcgcaagacctcgcgcaattggagcggccgatgcccgattagctagttggtgaggtaaaggctcaccaaggcgacaatcggtagctggtctgagaggacgaccagccacactgggactgagacacggcccagactcctacgggaggcagcagtggggaattttggacaatgggggcaaccctgatccagccatgccgcgtgcaggatgaaggccttcgggttgtaaactgcttttgtcagggacgaaaaggatcgtgataataccatggtctgctgacggtacctgaagaataagcaccggctaactacgtgccagcagccgcggtaatacgtagggtgcaagcgttaatcggaattactgggcgtaaagcgtgcgcaggcggttctgtaagacagatgtgaaatcacccgggctcaacctgggaattgcatttgtgactgcgaggactagagttcatcagaggggggtggaattccaagtgtagcagtgaaatgcgtagatatttggaagaacaccaatggcgaaggcagccccctgggatgcgactgacgctcatgcacgaaagcgtggggagcaaacaggattagataccctggtagtccacgccctaaacgatgtctactggttgttggggtttattaaccttggtaacgaagctaacgcgtgaagtagaccgcctggggagtacggtcgcaagattaaaactcaaaggaattgacggggacccgcacaagcggtggatgatgtggattaattcgatgcaacgcgaaaaaccttacctagccttgacatgccaggaatcctgaagagattcgggagtgcccgcaagggaatctggacacaggtgctgcatggctgtcgtcagctcgtgtcgtgagatgttgggttaagtcccgcaacgagcgcaacccttgtcactagttgctacgcaagagcactctagtgagactgccggtgacaaaccggaggaaggtggggatgacgtcaagtcctcatggcccttatggctagggcctcacacgtcatacaatggtcggtacagagggcagctaccctgcgaagggatgcgaatctcgaaagcctatctcagttcggattggaggctgaaacccgcctccatgaagttggattcgctagtaatcgcgcatcagccatggcgcggtgaatacgttcccgggccttgcacacaccgcccgtca

SEQ ID NO: 2931 - DNA, 1448 bp, Artificial Sequence; identical to SEQ ID NO: 925
  Synthetic polymer

SEQ ID NO: 2932 - DNA, 1385 bp, Artificial Sequence; identical to SEQ ID NO: 824
  Synthetic polymer
  misc_feature (730)..(730): n is a, c, g, or t
  misc_feature (787)..(787): n is a, c, g, or t

SEQ ID NO: 2933 - DNA, 1421 bp, Artificial Sequence; identical to SEQ ID NO: 1005
  Synthetic polymer

SEQ ID NO: 2934 - DNA, 1369 bp, Artificial Sequence
  Synthetic polymer
attgaacgctggcggaacgctttacacatgcaagtcgaacggtaacgtggggaggagcttgctccgccccgacgacgagtggcgaacgggtgagtaatacatcggaacgtgtccgctcgtgggggacaaccagccgaaaggttggctaataccgcatgagttctacggaagaaagagggggacccgcaagggcctctcgcgagcggagcggccgatgactgattagccggttggtgaggtaacggctcaccaaagcaacgatcagtagctggtctgagaggacgaccagccacactgggactgagacacggcccagactcctacgggaggcagcagtggggaattttggacaatgggcgcaagcctgatccagctattccgcgtgtgggatgaaggccctcgggttgtaaaccacttttgtagagaacgaaaagacaccatcgaataaatggtgttgctgacggtactctaagaataagcaccggctaactacgtgccagcagccgcggtaatacgtagggtgcgagcgttaatcggaattactgggcgtaaagggtgcgcaggcggttgagtaagacagatgtgaaatccccgagcttaactcgggaatggcatatgtgactgctcgactagagtgtgtcagagggaggtggaattccacgtgtagcagtgaaatgcgtagatatgtggaagaacaccgatggcgaaggcagcctcctgggacataactgacgctcaggcacgaaagcgtggggagcaaacaggattaggtaccctggtagtccacgccctaaacgatgttaactagtggttgggatgtaacaatctcagtaacgcagccaacgcgagaagttaaccgcctgggaagtacggtcgcaagactaaaactcaaaggaattgacggggacccgcacaagcggtggatgatgtggattaattcgatgcaacgcgaaaaaccttacctacccccgacatgtcaggaagctcttgtaatgagagcgtgcccgcaagggagcctgaacacaggtgctgcatggctgtcgtcagctcgtgtcgtgagatgttgggttaagtcccgcaacgagcgcaacccttgtcactagttgttacgaaagggcactctagtgagactgccggtgacaaaccggaggaaggtggggaggacgtcaagtcctcatggcccttatgggtagggcttcacacgtcatacaatggtcggaacagagggcagcgaagccgtgaggcggagccaatcccagaaaaccgatcgtagtccggattgcagtctgcaactcgactgcatgaagtcggaatcgctagtaatcgcggatcagcatgccgcggcgaataaaatcccgggtcttgcaca

SEQ ID NO: 2935 - DNA, 1455 bp, Artificial Sequence; identical to SEQ ID NO: 881
  Synthetic polymer

SEQ ID NO: 2936 - DNA, 1407 bp, Artificial Sequence; identical to SEQ ID NO: 386
  Synthetic polymer

SEQ ID NO: 2937 - DNA, 1451 bp, Artificial Sequence; identical to SEQ ID NO: 87
  Synthetic polymer

SEQ ID NO: 2938 - DNA, 1363 bp, Artificial Sequence; identical to SEQ ID NO: 35
  Synthetic polymer

SEQ ID NO: 2939 - DNA, 1447 bp, Artificial Sequence; identical to SEQ ID NO: 1054
  Synthetic polymer

SEQ ID NO: 2940 - DNA, 1463 bp, Artificial Sequence; identical to SEQ ID NO: 1040
  Synthetic polymer

SEQ ID NO: 2941 - DNA, 1488 bp, Artificial Sequence; identical to SEQ ID NO: 13
  Synthetic polymer

SEQ ID NO: 2942 - DNA, 1396 bp, Artificial Sequence; identical to SEQ ID NO: 1010
  Synthetic polymer

SEQ ID NO: 2943 - DNA, 1485 bp, Artificial Sequence; identical to SEQ ID NO: 842
  Synthetic polymer

SEQ ID NO: 2944 - DNA, 1501 bp, Artificial Sequence; identical to SEQ ID NO: 807
  Synthetic polymer

SEQ ID NO: 2945 - DNA, 1455 bp, Artificial Sequence; identical to SEQ ID NO: 1105
  Synthetic polymer

SEQ ID NO: 2946 - DNA, 1432 bp, Artificial Sequence; identical to SEQ ID NO: 1042
  Synthetic polymer

SEQ ID NO: 2947 - DNA, 1401 bp, Artificial Sequence
  Synthetic polymer
agagtttgatcctggctcagattgccttctggcggcatgctttacacatgcaagtcgaacggcagcggggaagtagcttgctacttctgccggcgagtggcgaacgggtgagtacaacatcggaacgtgtccgtttgtgggggacaactgctcgaaagggtagctaataccgcataagacctgagggtgaaagtgggggatcgcaagacctcacgcgaacggagcggccgatgactgattaggtagttggtgaggtaaaggcccaccaagccgacgatcagtagctggtctgagaggacgaccagccacactggaactgagacacggtccagactcctacgggaggcagcagtggggaattttggacaatgggggcaaccctgatccagccatgccgcgtgcgggaagaaggccttcgggttgtaaaccgcttttgtcagggacgaaaagttgcaggtgaataatctgcgatgctgacggtacctgaagaataagcaccggctaactacgtgccagcagccgcggtaatacgtagggtgcaagcgttaatcggaattactgggcgtaaagcgtgcgcaggcggttgggtaagacagatgtgaaatcccccgggcttaacctgggaactgcatttgtgactgtccgactcgagtatgtcagaggggggtggaattccacgtgtagcagtgaaatgcgtagatacgtggaagaacaccgatggcgaaggcagccccctggggcaaaactgacgctcatgcacgaaagcgtggggagcaaacaggattagataccctggtagtccacgccctaaacgatgtctaccggttgttggggggtaaaaccctcagtaacgaagcaaacgcgagaagtagaccgcctggggagtacggtcgcaagattaaaactcaaaggaattgacggggacccgcacaagcggtggatgatgtggattaattcgatgcaacgcgaaaaaccttacctagccttgacatgtcggagaggagccgtaaatggcgctgtgcccgcaagggaatccgaacacaggtgctgcatggctgtcgtcagctcgtgtcgtgagatgttgggttaagtcccgcaacgagcgcaacccttgtcaccagttgctaccgcaaggagcactctggtgagactgccggtgacaaaccggaggaaggtggggatgacgtcaagtcctcatggcccttatggctagggcctcacacgtcatacaatggtcggaacagagggcagcgaagccgcgaggtggagcaaatcccagaaaaccgatcgtagtccggattgcagtctgcaactcgactgcatgaagtcggaatcgctagtaatcgcggatcagcatgtcgcggtgaatacgttcccgggtcttgtacacaccacccgtca

SEQ ID NO: 2948 - DNA, 1449 bp, Artificial Sequence; identical to SEQ ID NO: 939
  Synthetic polymer

SEQ ID NO: 2949 - DNA, 1454 bp, Artificial Sequence; identical to SEQ ID NO: 1215
  Synthetic polymer

SEQ ID NO: 2950 - DNA, 1466 bp, Artificial Sequence; identical to SEQ ID NO: 1272
  Synthetic polymer

SEQ ID NO: 2951 - DNA, 1346 bp, Artificial Sequence; identical to SEQ ID NO: 1297
  Synthetic polymer

SEQ ID NO: 2952 - DNA, 1532 bp, Artificial Sequence; identical to SEQ ID NO: 1320
  Synthetic polymer

SEQ ID NO: 2953 - DNA, 1368 bp, Artificial Sequence; identical to SEQ ID NO: 517
  Synthetic polymer

SEQ ID NO: 2954 - DNA, 1421 bp, Artificial Sequence; identical to SEQ ID NO: 867
  Synthetic polymer
  misc_feature (3)..(3): n is a, c, g, or t

SEQ ID NO: 2955 - DNA, 1492 bp, Artificial Sequence; identical to SEQ ID NO: 1356
  Synthetic polymer

SEQ ID NO: 2956 - DNA, 1380 bp, Artificial Sequence; identical to SEQ ID NO: 1362
  Synthetic polymer

SEQ ID NO: 2957 - DNA, 1545 bp, Artificial Sequence; identical to SEQ ID NO: 1413
  Synthetic polymer

SEQ ID NO: 2958 - DNA, 1500 bp, Artificial Sequence; identical to SEQ ID NO: 1428
  Synthetic polymer

SEQ ID NO: 2959 - DNA, 1508 bp, Artificial Sequence; identical to SEQ ID NO: 1196
  Synthetic polymer

SEQ ID NO: 2960 - DNA, 1465 bp, Artificial Sequence; identical to SEQ ID NO: 1203
  Synthetic polymer

SEQ ID NO: 2961 - DNA, 1457 bp, Artificial Sequence; identical to SEQ ID NO: 1245
  Synthetic polymer

SEQ ID NO: 2962 - DNA, 1392 bp, Artificial Sequence; identical to SEQ ID NO: 1319
  Synthetic polymer

SEQ ID NO: 2963 - DNA, 1453 bp, Artificial Sequence; identical to SEQ ID NO: 1330
  Synthetic polymer

SEQ ID NO: 2964 - DNA, 1478 bp, Artificial Sequence; identical to SEQ ID NO: 1342
  Synthetic polymer

SEQ ID NO: 2965 - DNA, 1400 bp, Artificial Sequence; identical to SEQ ID NO: 1376
  Synthetic polymer

SEQ ID NO: 2966 - DNA, 1371 bp, Artificial Sequence; identical to SEQ ID NO: 1388
  Synthetic polymer

SEQ ID NO: 2967 - DNA, 1402 bp, Artificial Sequence; identical to SEQ ID NO: 1397
  Synthetic polymer

SEQ ID NO: 2968 - DNA, 1465 bp, Artificial Sequence; identical to SEQ ID NO: 1435
  Synthetic polymer

SEQ ID NO: 2969 - DNA, 1486 bp, Artificial Sequence; identical to SEQ ID NO: 71
  Synthetic polymer

SEQ ID NO: 2970 - DNA, 1373 bp, Artificial Sequence; identical to SEQ ID NO: 1463
  Synthetic polymer

SEQ ID NO: 2971 - DNA, 1374 bp, Artificial Sequence; identical to SEQ ID NO: 899
  Synthetic polymer

SEQ ID NO: 2972 - DNA, 1454 bp, Artificial Sequence; identical to SEQ ID NO: 1078
  Synthetic polymer

SEQ ID NO: 2973 - DNA, 1423 bp, Artificial Sequence; identical to SEQ ID NO: 946
  Synthetic polymer

SEQ ID NO: 2974 - DNA, 1386 bp, Artificial Sequence; identical to SEQ ID NO: 143
  Synthetic polymer

SEQ ID NO: 2975 - DNA, 1460 bp, Artificial Sequence; identical to SEQ ID NO: 843
  Synthetic polymer

SEQ ID NO: 2976 - DNA, 1381 bp, Artificial Sequence; identical to SEQ ID NO: 362
  Synthetic polymer

SEQ ID NO: 2977 - DNA, 1470 bp, Artificial Sequence
  Synthetic polymer
acgaacgctggcggcgtgcttaacacatgcaagtcgaacgaagatacggagcggaacccttcggggggaagatctgtagactgagtggcggacgggtgagtaacgcgtgagcaacctgcctacaagagggggacaacagctggaaacggctgctaataccgcataagaccacgctatcgcatggtagaggggtcaaagatttatcgcttgtagatgggctcgcgtcccattagctagttggtgagataacagcccaccaaggcgacgatgggtagccgacctgagagggtgatcggccacactggaactgagacacggtccagactcctacgggaggcagcagtggggaatattgggcaatgggggaaaccctgacccagcaacgccgcgtgagggaagaaggccttcgggttgtaaacctctgtccttggggacgaaggaagtgacggtacccaaggaggaagctccggctaactatgtgccagcagccgcggtaatacgtagggagcgagcgttgtccggaattactgggcgtaaagggtgcgtaggcggcctgttaagtcagatgtgaaatacccgggcttaacccggggggtgcatctgatactggcaggcttgagtgcaggagaggaaagcggaattcctagtgtagcggtgaaatgcgtagatattaggaggaacaccagtggcgaaggcggctttctggactgtaactgacgctgaggcacgaaagcgtggggagcaaacaggattagataccctggtagtccacgccgtaaacgatggatactaggtgtaggggtcaaaaagacttctgtgccgcagcaaacgcattaagtatcccgcctgggggagtacggccgcaaggctgaaactcaaaggaattgacgggggcccgcacaagcagcggagcatgtggtttaattcgaagcaacgcgaagaaccttaccaaggcttgacatcctctgacgcacatagagatatgtgttctctacggagcagagagacaggtggtgcatggttgtcgtcagctcgtgtcgtgagatgttgggttaagtcccgcaacgagcgcaacccttgtcactagttgccagcattacggatgggaactctagtgagactgccggggacaactcggaggaaggtggggacgacgtcaaatcatcatgccccttatgtcttgggctacacacgtgctacaatggccggtacaaagggcagcgaaggcgcaagccggagcgaatctcaaaaagccggtcccagttcggattgtgggctgcaacccgcccacatgaagtcggagttgctagtaatcgcgaatcagcatgtcgcggtgaatgcgttcccgggccttgtacacaccgcccgtcacaccacggaagttgggggcgcccgaagccggtggcctaaccgcaaggggggagccgtcgaaggtgaaaccaatgactggggtgaagtcgtaacaaggta

SEQ ID NO: 2978 - DNA, 1378 bp, Artificial Sequence
  Synthetic polymer
agagtttgatcctggctcagggcgaacgctggtggcgtgcctaacacatgcaagtcgagcgaacggaggggcttcggccccgaagttagcggcggacgggtgagtaacgcgtgagcaatctgcctttcacagtgggataacattgagaaatcagtgctaataccgcataagaccacagcctcgcatggggcaggggtcaaaggagcaatccggtggaagatgagttcgcgtcccattagatagttggtgaggtaacggctcaccaagtcaacgatgggtagccgacctgagagggtgatcggccacattgggactgagacacggcccaaactcctacgggaggcagcagtggggaatattgggcaatgggcgcaagcctgacccagcaacgccgcgtgagggaagaaggttttcggattgtaaacctctgtcctcagggacgaagaaagtgacggtacctgaggaggaagccccggctaactacgtgccagcagccgcggtaatacgtagggggcgagcgttgtccggaattactgggcgtaaagggcgcgcaggcggccgatcaagtcagatgtgaaacccccgggcttaacctgggaactgcatttgaaactggttggcttgagtgcaggagaggaaagcggaattcctagtgtagcggtgaaatgcgtagatattaggaagaacaccagtggcgaaggcggctttctggactgcaactgacgctgaggcgcgaaagcgtggggagcgaacaggattagataccctggtagtccacgccgtaaacgatggatgctaggtgtgggaggtatcgaccccttccgtgccgcagccaacgcaataagcatcccgcctgaggagtacggccgcaaggttgaaactcaaagggattgacgggggcccgcacaagcagcggagcatgtggtttaattcgaagcaacgcgaagaaccttaccaggtcttgacatctcctgaatggcgtggaaacacgcaggcccttcggggcaggaagacaggtggtgcatggttgtcgtcagctcgtgtcgtgagatgttgggttaagtcccgcaacgagcgcaacccttatacttagttgccagcgagtgaagtcgggcactctaggtagactgccggggacaactcggaggaaggtggggacgacgtcaaatcatcatgccccttatgacctgggctacacacgtgctacaatggccgggacaaagggaagcgaaggggtaacccggagcggaacccaaaaacccggtcccagttcggattgtgggctgcaacccgcccacatgaagtcggagttgctagtaatcgtggatcagcatgccacggtgaatacgttcccgggccttgtactcaccgcccgtca

SEQ ID NO: 2979 - DNA, 1509 bp, Artificial Sequence
  Synthetic polymer
gagtttgatcctggctcaggacgaacgctggcggcgtgcctaacacatgcaagtcgaacggacgagtcccttcgggggcgagttagtggcgaacgggtgagtaacgcgtgaacaacctgccttcctgagggggataacacctggaaacagatgctaataccgcataagaccacagtgccgcatgacacaggggtcaaaggagcaatccgcaggaagaggggttcgcgtcccattagctggttggcggggcaacggcccaccaaggcgacgatgggtagccgagctgagaggctgatcggccacactggaactgagacacggtccagactcctacgggaggcagcagtggggaatattgggcaatgggcgcaagcctgacccagcaacgccgcgtgagggatgaaggccttcgggttgtaaacctctgtccttggagacgaagaaagtgacggtaaccaaggaggaagccccggctaactacgtgccagcagccgcggtaatacgtagggggcgagcgttgtccggaattactgggcgtaaagggtgcgtaggcggcaatttaagttggatgtgaaatacccgggcttaacttggggggtgcattcaaaactggatagctagagtacaggagagggaagcggaattcctagtgtagcggtgaaatgcgtagatattaggaggaacaccggtggcgaaggcggctttctggactgaaactgacgctgaggcacgaaagcgtggggagcaaacaggattagataccctggtagtccacgctgtaaacgatgaatactaggtgtagggggtatagactccctctgtgccggagcaaacgcaataagtattccgcctggggagtacggccgcaaggttgaaactcaaaggaattgacgggggcccgcacaagcagcggagcatgtggtttaattcgacgcaacgcgaagaaccttaccaaggcttgacatcctactaaagtcatggaaacatgatgtcccttcgggggagtagagacaggtggtgcatggttgtcgtcagctcgtgtcgtgagatgttgggttaagtcccgcaacgagcgcaacccctgttgccagttaccagcgcgtaaaggcggggactctggtgagactgccggggacaactcggaggaaggtggggacgacgtcaaatcatcatgccccttacgtcttgggctacacacgtgctacaatggctgtaacaaagggaagcaactgggtaaccagaagcgaatctcataaaagcagtcccagttcggattgtgggctgcaacccgcccacatgaagtcsgagttgctagtaatcgcggatcagcatgccgcggtgaatacgttcccgggccttgtacacaccgcccgtcacaccatgggagttgggagcgcccgaagccggtaacttaaccgcaaggagagagccgtcgaaggcgagatcaatgactggggtgaagtcgtaacaaggtagccgtatcggaaggtgcggctggatcacctcctt

SEQ ID NO: 2980 - DNA, 1428 bp, Artificial Sequence; identical to SEQ ID NO: 952
  Synthetic polymer

SEQ ID NO: 2981 - DNA, 1391 bp, Artificial Sequence; identical to SEQ ID NO: 662
  Synthetic polymer

SEQ ID NO: 2982 - DNA, 1344 bp, Artificial Sequence; identical to SEQ ID NO: 1016
  Synthetic polymer

SEQ ID NO: 2983 - DNA, 1460 bp, Artificial Sequence; identical to SEQ ID NO: 503
  Synthetic polymer

SEQ ID NO: 2984 - DNA, 1485 bp, Artificial Sequence
  Synthetic polymer
agttcgatcctggctcaggacgaacgctggcggcgtgcctaacacatgcaagtcgagcggggatggtaaggagcttgcttcggaccattctagcggcggacgggtgagtaacgcgtgagcaatctgtcctgcacagggggataacacttggaaacaggtgctaataccgcataagaccacggagccgcatggcgcaggggtcaaaggagcaatccggtgcagggtgagctcgcgtcccattagatagttggcggggtaacggcccaccaagtcgacgatgggtagccgacctgagagggtgatcggccacactgggactgagacacggcccagactcctacgggaggcagcagtggggaatattgggcaatgggcgaaagccttacccagcaacgccgcgtgagggaagaaggttttcggattgtaaacctctgtcctgggggacgaaggaagtgacggtaccccgggaggaagccccggctaactacgtgccagcagccgcggtaatacgtagggggcgagcgttgtccggaattattgggcgtaaagggcgcgtagacggccgagtaagttataggtgaaagcccatctttcaaggatggaattgcctgtaatactgcctggcttgagtgcaggagagggaagcggaattcctagtgtagcggtgaaatgcgtagatattaggaggaacaccagtggcgaaggcggctttctggactgtaactgacgttgaggcgcgaaagcgtggggagcaaacaggattagataccctggtagtccacgccgtaaacgatggatgctaggtgtgggaggtatcgaccccttccgtgccggagttaacgcaataagcatcccgcctggggagtacggccgcaaggttgaaactcaaaggaattgacgggggcccgcacaagcagcggagcatgtggtttaattcgaagcaacgcgaagaaccttaccaggacttgacatccgattaaagcggtggaaacaccgtgtggcttcggccgaatcgagacaggtggtgcatggttgtcgtcagctcgtgtcgtgagatgttgggttaagtcccgcaacgagcgcaacccttatttccagttactaacaggtagagctgaggactctgaagagaccgccggggacaactcggaggaaggtggggacgacgtcaaatcatcatgccccttatgttctgggctacacacgtgctacaatggtgactacaaagagaagcgagatcgcaagatggagcggatctcaaaaaagtcatctcagttcggattgtgggctgcaacccgcccacatgaagtcggagttgctagtaatcgcggatcagcatgccgcggtgaatacgttcccgggccttgtacacaccgcccgtcacaccatgggagtttggagcacccgaagtcagtgaggtaaccgcaaggagccagctgccgaaggtgagccagatgactggggtgaagtcgtaacaaggtagcc

SEQ ID NO: 2985 - DNA, 1390 bp, Artificial Sequence; identical to SEQ ID NO: 635
  Synthetic polymer

SEQ ID NO: 2986 - DNA, 1343 bp, Artificial Sequence; identical to SEQ ID NO: 48
  Synthetic polymer

SEQ ID NO: 2987 - DNA, 1457 bp, Artificial Sequence; identical to SEQ ID NO: 7
  Synthetic polymer

SEQ ID NO: 2988 - DNA, 1355 bp, Artificial Sequence; identical to SEQ ID NO: 768
  Synthetic polymer

SEQ ID NO: 2989 - DNA, 1426 bp, Artificial Sequence; identical to SEQ ID NO: 10
  Synthetic polymer

SEQ ID NO: 2990 - DNA, 1424 bp, Artificial Sequence
  Synthetic polymer
  misc_feature (211)..(211): n is a, c, g, or t
  misc_feature (1109)..(1109): n is a, c, g, or t
cgctggcggcgtgcctacgcatgcaagtcgaacggagacgttgatttcggttgacgtcttagtggcgaacgggtgagtaacgcgtgaacaacctgaccttaagagggggataacaacgagaaatcgttgctaataccgcataagaccacaatgccgcatggcgaaggggtcaaaggagcaatccgcttaaggaggggttcgcgtcccattnggtagtaggtgaggtaacggctcacctagccgacgatgggtagccgagctgagaggctgatcggccacactgggactgagacacggtccagactcctacgggaggcagcagtggggaatattgggcaatgggcgcagcctgacccagcaacgccgcgtgagggaagaaggttttcggattgtaaacctctgtcgcagatgacgaaggaagtgacggtaatctgtgaggaagccccggctaactacgtgccagcagccgcggtaatacgtagggggcgagcgttgtccggaattactgggcgtaaagggagcgtaggcggtcgattaagttggatgtgaaatacccgggcttaacttggggggtgcatccaatactggttgactagagtacaggagaggaaagcggaattcctagtgtagcggtgaaatgcatagatattaggaggaacatcggtggcgaaggcggctttctggactgacactgacgctgaggctcgaaagcgtggggagcaaacaggattagataccctggtagtccacgctgtaaacgatgaatactaggtgtagggggtgtaaactccccctgtgccgcagctaacgcaataagtattccgcctggggagtacggccgcaaggttgaaactcaaaggaattgaacgggggcccgcacaagcagcggagcatgtggtttaattcgacgcaacgcgaagaaccttaccaaggcttgacatccacttaaactcatggaaacatgaggtcccttcgggggaagtgagacaggtggtgcatggttgtcgtcagctcgtgtcgtgagatgttgggttaagtcccgcaacgagcgcaacccctgttgccagttaccagcgagtaatgttggggactctggtgagactgccggngacaactcggaggaaggtggggacgacgtcaaatcatcatgccccttacgtcttgggctacacacgtgctacaatggctgtaacaaagggaagcgaccctgcaaagggaagcggatctcagaaaagcagtcccagttcggattgtgggctgcaacccgcccacatgaagtcggagttgctagtaatcgcggatcagcatgccgcggtgaatacgttcccgggccttgtacacaccgcccgtcacaccatgggagttgggagcgcccgaagccggtattctaaccgcaaggaggaagccgtctaaggcgagaccaa

SEQ ID NO: 2991 - DNA, 1510 bp, Artificial Sequence; identical to SEQ ID NO: 862
  Synthetic polymer

SEQ ID NO: 2992 - DNA, 1402 bp, Artificial Sequence
  Synthetic polymer
ttcgcccttagagtttgatcctggctcaggacgaacgctggcggcgtgcttaacacatgcaagtcgaacgaagttgctctttgggaagccctcgggtggaactgtgagtatacttagtggcggacgggtgagtaacgcgtgagcaatctgccctgcaatgggggacaacagttggaaacgactgctaatgccgcataagaccacgaaaccgcatggtttagaggtaaaaggattcattcgatgcaggatgagctcgcgtcccattagatagttggtgaggtaacggcccaccaagtcaacgatcggtagccggactgagaggttgaacggccacattgggactgagacacggcccagactcctacgggaggcagcagtggggaatattgcacaatgggggaaaccctgatgcagcgacgccgcgtggaggaagaaggtcttcggattgtaaactcctgttgttggggaagataatgacggtgcccaacaaggaagtgacggctaactacgtgccagcagccgcggtaatacgtagggagcaagcgttgtccggaattactgggcgtaaagggtgcgtaggtggccatgtaagtcaggtgtgaaagaccggggctcaaccccggggttgcacttgaaactgtgtggcttgagtacaggagagggaagtggaattcctagtgtagcggtgaaatgcgtagatattaggaggaacaccagtggcgaaggcgactttctggactgtaactgacactgaggcacgaaagcgtggggagcaaacaggattagataccctggtagtccacgccgtaaacgatggatactaggtgtgggggggcgatagtcctccgtgccgaagctaacgcattaagtatcccgcctggggagtacgatcgcaaggttgaaactcaaaggaattgacgggggcccgcacaagcagcggagcatgtggtttaattcgaagcaacgcgaagaaccttaccaaggcttgacatcctctgacgcatatagagatatatgttcccttcggggcagagagacaggtggtgcatggttgtcgtcagctcgtgtcgtgagatgttgggttaagtcccgcaacgagcgcaacccttgttgctagttgccagcacgtaaaggtgggaactctagtgagactgccggggacaactcggaggaaggtggggacgacgtcaaatcatcatgccccttatgtcttgggctacacacgtgctacaatggccggtacaaagggcagcgacctcgtaagagtaagcgaatctcaaaaagccggccccagttcggattgtgggctgcaacccgcccacatgaagtcggagttgctagtaatcgcgaatcagcatgtcgcggtgaatgcgttcccgggccttgcacacaccgcccgtca

SEQ ID NO: 2993 - DNA, 1363 bp, Artificial Sequence; identical to SEQ ID NO: 791
  Synthetic polymer

SEQ ID NO: 2994 - DNA, 1390 bp, Artificial Sequence
  Synthetic polymer
ttcgcccttagagtttgatcctggctcaggacgaacgctggcggcgtgcctaacacatgcaagtcgaacggagatattgaatttcggtttagtattttagtggcgcacgggtgagtaacgcgtgaacaacttgaccttcagagggggataacagcgagaaatcggtgctaataccgcatgagaccacaagcccgcatggggaaggggtcaaaggaggaatccgctgaaggagaggttcgcgtcccattaggtagttggcgggataacagcccaccaagccgacgatgggtagccgagctgagaggctgatcggccacactggaactgagacacggtccagactcctacgggaggcagcagtggggaatattgggcaatgggcgcaagcctgacccagcaacgccgcgtgagggaagaaggctttcgggttgtaaacctctgtccttggtgacgaaggaagtgacggtagccaaggaggaagccccggctaactacgtgccagcagccgcggtaatacgtagggggcgagcgttgtccggaattactgggcgtaaagggtgcgtaggcggcggattaagttggatgtgaaatacccgggcttaacttgggggctgcatccaatactggtctgctagagtgcaggagagggaagcggaattcctagtgtagcggtgaaatgcatagatattaggaggaacaccagtggcgaaggcggctttctggactgtaactgacgctgaggcacgaaagcgtggggagcaaacagaattagataccctggtagtccacgctgtaaacgatgaataccaggtgtagggggtatcaactccccctgtgccggagcaaacgcaataagtattccgcctggggagtacggccgcaaggttgaaactcaaaggaattgacgggggcccgcacaagcagcggagcatgtggtttaattcgacgcaacgcgaagaaccttaccaaggcttgacatccacttaagcccatggaaacatggggtgccttcgggcgaagtgagacaggtggtgcatggttgtcgtcagctcgtgtcgtgagatgttgggttaagtcccgcaacgagcgcaacccctgttgccagttaccagcgggtaaagccggggactctggtgagactgccggggacaactcggaggaaggtggggacgacgtcaaatcatcatgccccttatgtcttgggctacacacgtgctacaatggctgaaacaaagggaagcgaccctgtaaggggaagcggatctcagaaaaacagtcccagttcggattgtgggctgcaacccgcccacatgaagtcggagttgctagtaatcgcggatcagcatgccgcggtgaatacgttcccgggccttgtacacaccgcccgtca

SEQ ID NO: 2995 - DNA, 1495 bp, Artificial Sequence
  Synthetic polymer
ggctcaggacgaacgctggcggcgtgcttaacacatgcaagtcgaacgaggttgccctttgtgaatccttcgggaggaactgtgggtataccgagtggcggacgggtgagtaacgcgtgagcaacctgccctgcaacgggggacaacagttggaaacgactgctaataccgcatgagaccacgaaaccgcatggttttgaggtaaaaggatttattcgatgcaggatgggctcgcgtcccattagatagttggtgaggtaacggcccaccaagtcaacgatgggtagccgacctgagagggtgatcggccacactggaactgagacacggtccagactcctacgggaggcagcagtggggaatattgggcaatgggggaaaccctgacccagcaacgccgcgtgagggaagaaggtcttcggattgtaaacctttgtcctatgggacgaaagaaatgacggtaccataggaggaagctccggctaactacgtgccagcagccgcggtaatacgtagggagcaagcgttgtccggaattactgggcgtaaagggtgcgtaggtggtcatgtaagtcagatgtgaaagaccggggcttaaccccggggttgcatttgaaactgtgtgacttgagtacaggagagggaagtggaattcctagtgtagcggtgaaatgcgtagatattaggaggaacaccagtggcgaaggcgactttctggactgtaactgacactgaggcacgaaagcgtggggagcaaacaggattagataccctggtagtccacgccgtaaacgatggatactaggtgtggggcccgatagggttccgtgccgaagcaaacgcattaagtatcccgcctggggagtacgatcgcaaggttgaaactcaaaggaattgacgggggcccgcacaagcagcggagcatgtggtttaattcgaagcaacgcgaagaaccttaccaaggcttgacatcctctgacgactgtagagatacagtttcccttcggggcagagagacaggtggtgcatggttgtcgtcagctcgtgtcgtgagatgttgggttaagtcccgcaacgagcgcaacccttattgctagttgccagcgcgtaaaggcgggaactctagtgagactgccggggacaactcggaggaaggtggggacgacgtcaaatcatcatgccccttatgtcttgggctacacacgtgctacaatggccggtacaaagggcagcgaacccgtaaggggaagcgaatctcaaaaagccggtcccagttcggattgtgggctgcaacccgcccacatgaagtcggagttgctagtaatcgcgaatcagcatgtcgcggtgaatgcgttcccgggccttgtacacaccgcccgtcacaccacggaagttgggagcacccgaagccagtggcttaaccgtaaggagagagctgtcgaaggtgagatcaatgactggggtgaagtcgtaacaaggtagccgtatcggaagg

SEQ ID NO: 2996 - DNA, 1350 bp, Artificial Sequence; identical to SEQ ID NO: 40
  Synthetic polymer

SEQ ID NO: 2997 - DNA, 1497 bp, Artificial Sequence
  Synthetic polymer
agagtttgatcctggctcaggacgaacgctggcggcgtgcttaacacatgcaagtcgaacgaagttgctctttgggaagccctcgggtggaactgtgagtatacttagtggcggacgggtgagtaacgcgtgagcaatctgccctgcaatgggggacaacagttggaaacgactgctaataccgcataagaccacgaaaccgcatggtttagaggtaaaaggattcattcgatgcaggatgagctcgcgtcccattagatagttggtgaggtaacggcccaccaagtcaacgatgggtagccgacctgagagggtgatcggccacattggaactgagaaacggtccaaactcctacgggaggcagcagtggggaatattgggcaatgggggaaaccctgacccagcaacgccgcgtgaaggaagaaggccttcgggttgtaaacttttgtcctatgggacgaaaaaaatgacggtaccataggaggaagctccggctaactacgtgccagcagccgcggtaatacgtagggagcaagcgttgtccggaattactgggcgtaaagggtgcgtaggtggccatgtaagtcaggtgtgaaagaccggggctcaaccccggggttgcacttgaaactgtgtggcttgagtacaggagagggaagtggaattcctagtgtagcggtgaaatgcgtagatattaggaggaacaccagtggcgaaggcgactttctggactgtaactgacactgaggcacgaaagcgtggggagcaaacaggattagataccctggtagtccacgccgtaaacgatggatactaggtgtggggggcgatagtcctccgtgccgaagctaacgcattaagtatcccgcctggggagtacgatcgcaaggttgaaactcaaaggaattgacgggggcccgcacaagcagcggagcatgtggtttaattcgaagcaacgcgaagaaccttaccaaggcttgacatcctctgacgcatatagagatatatgttcccttcggggcagagagacaggtggtgcatggttgtcgtcagctcgtgtcgtgagatgttgggttaagtcccgcaacgagcgcaacccttgttgctagttgccagcacgtaaaggtgggaactctagtgagactgccggggacaactcggaggaaggtggggacgacgtcaaatcatcatgccccttatgtcttgggctacacacgtgctacaatggccggtacaaagggcagcgacctcgtaagagtaagcgaatctcaaaaagccggccccagttcggattgtgggctgcaacccgcccacatgaagtcggagttgctagtaatcgcgaatcagcatgtcgcggtgaatgcgttcccgggccttgtacacaccgcccgtcacaccacggaagttgggagcacccgaagccagtggcttaaccgtaaggagagagctgtcgaaggtgagatcaatgactggggtgaagtcgtaacaaggtaacc

SEQ ID NO: 2998 - DNA, 1386 bp, Artificial Sequence; identical to SEQ ID NO: 682
  Synthetic polymer

SEQ ID NO: 2999 - DNA, 1370 bp, Artificial Sequence; identical to SEQ ID NO: 705
  Synthetic polymer

SEQ ID NO: 3000 - DNA, 1419 bp, Artificial Sequence
  Synthetic polymer
  misc_feature (1415)..(1416): n is a, c, g, or t
gacgaacgctggcggcgtgcctaacacatgcaagtcgaacggagataaagatttcggtttttatcttagtggcgcacgggtgagtaacacgtgaataacctgacccaaagagggggataacacctggaaacaggtgctaataccgcataagaccacaatgtcgcatgacgaaggggtcaaagaaaatcgctttgggaggggttcgcgtcccattaggtagtaggcggggtaacagcccacctagccgacgatgggtagccgagctgagaggctgatcggccacactggaactgagacacggtccagactcctacgggaggcagcagtggggaatattgggcaatgggcgcaagcctgacccagcaacgccgcgtgagggaagaaggttttcggattgtaaacctctgtcgcagaagacgaaggaagtgacggtattctgtgaggaagccccggctaactacgtgccagcagccgcggtaatacgtagggggcgagcgttgtccggaattactgggcgtaaagggagcgtaggcggtctgataagttggatgtgaaatacccgggcttaacttggggggtgcatccaatactgttggactagagtacaggagaggaaagcggaattcctagtgtagcggtgaaatgcatagatattaggaggaacatcggtggcgaaggcggctttctggactgcaactgacgctgaggctcgaaagcgtggggagcaaacaggattagataccctggtagtccacgctgtaaacgatgaatactaggtgtagggggtataaactccctctgtgccgcagcaaacgcaataagtattccgcctggggagtacggccgcaaggttgaaactcaaaggaattgacgggggcccgcacaagcggtggagcatgtggtttaattcgatgcaacgcgaagaaccttaccaggtcttgacatccagagaatctttaggaaactaaagagtgcctttgggaactctgagacaggtggtgcatggttgtcgtcagctcgtgtcgtgagatgttgggttaagtcccgcaacgagcgcaacccctgctattagttactaacaagtaaagttgaggactctaatgggactgcctgtgacaagcaggaggaaggtggggatgacgtcaaatcatcatgccctttatgatctgggctacacacgtgctacaatggatggtacagagagcagcgaaatcgtgaggtcaagcgaatctcaaaaagccattctcagttcggattgtagtctgcaactcgactacatgaagtcggaatcgctagtaatcgcggatcagaatgtcgcggtgaatgcgttcccgggccttgtacacaccgcccgtcacaccacgaaagctggcaacacccgaagccggtgagctagccttataggaagcagccgnngaa

SEQ ID NO: 3001 - DNA, 1504 bp, Artificial Sequence; identical to SEQ ID NO: 511
  Synthetic polymer

SEQ ID NO: 3002 - DNA, 1482 bp, Artificial Sequence; identical to SEQ ID NO: 829
  Synthetic polymer

SEQ ID NO: 3003 - DNA, 1345 bp, Artificial Sequence; identical to SEQ ID NO: 980
  Synthetic polymer

SEQ ID NO: 3004 - DNA, 1476 bp, Artificial Sequence; identical to SEQ ID NO: 838
  Synthetic polymer

SEQ ID NO: 3005 - DNA, 1388 bp, Artificial Sequence; identical to SEQ ID NO: 691
  Synthetic polymer

SEQ ID NO: 3006 - DNA, 1365 bp, Artificial Sequence
  Synthetic polymer
agagtttgatcctggctcaggacgaacgctggcggcgtgcttaacacatgcaagtcgaacggaggtatttatttcggtagatatcttagtggcgaacgggtgtgagtaacgcgtgagcaacctgacctaaagagggggataacattcggaaacggatgctaataccgcataagaccacattgtcacatgacagaggggtcaaaggagcaatccgctttgggaggggctcgcgtcccattaggtagttggtgaggtaacggcccaccaagcctgcgatgggtagccgagctgagaggctgaacggccacactggaactgagacacggtccagactcctacgggaggcagcagtggggaatattgggcaatgggcgcaagcctgacccagcaacgccgcgtgagggaagaaggttttcggattgtaaacctctgtccttggggacgaaaaaaatgacggtacccgaggaggaagccccggctaactacgtgccagcagccgcggtaatacgtagggggcgagcgttgtccggaattactgggcgtaaagggtgcgtaggcggtttattaagttggatgtgaaatacccgggcttaacttgggaggtgcatccaaaactggtagactagagtacaggagagggaagcggaattcctagtgtagcggtgaaatgcgtagatattaggaggaacaccagtggcgaaggcggctttctggactgacactgacgctgaggcacgaaagcgtggggagcaaacaggattagataccctggtagtccacgctgtaaacgatgaatactaggtgtagggggtatcaactccccctgtgccggagcaaacgcaataagtattccgcctggggagtacggccgcaaggttgaaactcaaaggaattgacgggggcccgcacaagcagcggagcatgtggtttaattcgaagcaacgcgaagaaccttaccaaggcttgacatcctgctaaactcatggaaacatgaggtcccttcgggggagcagagacaggtggtgcatggttgtcgtcagctcgtgtcgtgagatgttgggttaagtcccgcaacgagcgcaacccctattaccagttaccagcacgtaaaggtgggaactctggtgagactgccggggacaactcggaggaaggtggggatgacgtcaaatcatcatcccccttatgtcttgggctacacacgtgctacaatggcagttacagagggcagcgaagcggtaacgtgaagcgaatctcataaagccattctcagttcggattgcaggctgaaactcgcctgcatgaagctggagttactagtaatcgcagatcagaatgctgcggtgaatgcgttcccgggtcttg

SEQ ID NO: 3007 - DNA, 1492 bp, Artificial Sequence; identical to SEQ ID NO: 496
  Synthetic polymer

SEQ ID NO: 3008 - DNA, 1456 bp, Artificial Sequence
  Synthetic polymer
gacgaacgctggcggcatgcttaacacatgcaagtcgaacggagatctgcagaaaagcttgcttggaaacagatcttagtggcggacgggtgagtaacgcgtgaggaacctggctcacacagggggataacatagggaaacttatgctaataccgcatgagaccacgctatcgcatggtagaggggtcaaaggagcaatccggtgtgaggtggactcgcgtcctattagatagttggtggggtaacggcccaccaagtcgacgataggtagccgagctgagaggctgatcggccacattgggactgagacacggcccaaactcctacgggaggcagcagtggggaatattgggcaatgggcgcaagcctgacccagcaatgccgcgtgagagaagaaggttttcggattgtaaatctctgtcctaagggaagaagaaagtgacggtaccttaggaggaagccccggctaactacgtgccagcagccgcggtaatacgtagggggcaagcgttgtccggaattactgggcgtaaagggcgcgtaggcggcctgccaagtcttgtgtgaaaaccctggtttcaagccaggaggtgcacgggaaactggcgggcttgagtgcaggagagggaagtggaattccaagtgtagcggtgaaatgcgtagagatttggaggaacaccagtggcgaaggcgactttctggactgtaactgacgctgaggcgcgaaagcgtggggagcaaacaggattagataccctggtagtccacgccgtaaacgatgaatgctaggtgtaggaggtatcgaccccttctgtgccgcagttaacacaataagcattccgcctggggagtacggccgcaaggttgaaactcaaaggaattgacgggggcccgcacaagcagcggagcatgttgtttaattcgacgcaacgcgaagaaccttaccaggtcttgacatccacggaattttgtggaaacacgaaagtgccctttcggggagccgtgagacaggtggtgcatggttgtcgtcagctcgtgtcgtgagatgttgggttaagtcccgcaacgagcgcaacccttgtgaatagttactaacgggtaaagccgaggactctattgagactgccggggacaactcggaggaaggtggggacgacgtcaaatcatcatgccccttatgatctgggctacaaacgtgctacaatggccgttacaaagggaagcgacactgtaaggtgaagcggatcccaaaaaagcggtctcagttcggatcgtgggctgcaacccgcccacgtgaagttggagttgctagtaatcgcgaatcagtatgtcgcggtgaatacgttcccgggccttgtacacaccgcccgtcacaccatgggagtttagagcacccgaagtcagtggggtaaccgcaaggagccagctgccgaaggtgagctagatgactggggtg

SEQ ID NO: 3009 - DNA, 1376 bp, Artificial Sequence
  Synthetic polymer
ttcgcccttagagtttgatcctggctcaggacgaacgctggcggcacgcctaacacatgcaagtcgagcgagaacttcggttctagcggcggacgggtgagtaacacgtgagcaacctgcctttcagagggggacaacagttggaaacgactgctaataccgcataatgtcatttggcggcatcgttgaatgaccaaaggagcaatccgctgaaagatgggctcgcgtccaattagatagttggtggggtaacggcctaccaagtcgacgattggtagccggactgagaggttgaacggccacattgggactgagatacggcccagactcctacgggaggcagcagtggggaatattgcacaatgggggaaaccctgatgcagcaacgccgcgtaaaggaagacggtcttcggattgtaaacttttgttcttggtgaagaagcaagtgacggtagccaaggaggaagccacggctaactacgtgccagcagccgcggtaatacgtaggtggcaagcgttgtccggaattactgggcgtaaagggtgcgtaggcggtttggtaagttggatgtgaaatacccgggcttaacttgggggctgcatccaatactgtcggacttgagtgcaggagaggaaagcggaattcctagtgtagcggtgaaatgcgtagatattaggaggaacaccggtggcgaaggcggctttctggactgtaactgacgctgaggcacgaaagcgtggggagcaaacaggattagataccctggtagtccacgccgtaaacgatgaatactaggtgtagggggtatagactccctctgtgccgcagcaaacgcaataagtattccgcctggggagtacggccgcaaggttgaaactcaaaggaattgacgggggcccgcacaagcagcggagcatgtggtttaattcgacgcaacgcgaaaaaccttaccaagacttgacatcctactaaactcatggaaacatgaggtgacttcggtcgagtagagacaggtggtgcatggttgtcgtcagctcgtgtcgtgagatgttgggttaagtcccgcaacgagcgcaacccctgttgccggttaccagcgagtaaagtcgggggctccggtgagactgccgaggacaactcggaggaaggtggggacgacgtcaaatcatcatgccccttacgtcttgggctacacacgtgctacaatggctgtaacaaagggaagcgacagcgtaagctgaagcggatctcgaaaaggcagtcccagttcggattgtgggctgcaacccgcccacatgaagtcggagttgctagtaatcgcggatcagcatgccgcggtgaatacgttcccgggccttgcacacaccgcccgtca

SEQ ID NO: 3010 - DNA, 1383 bp, Artificial Sequence; identical to SEQ ID NO: 237
  Synthetic polymer

SEQ ID NO: 3011 - DNA, 1344 bp, Artificial Sequence
  Synthetic polymer
gacgaacgctggcggcgtgcctaatacatgcaagtcgagcggagttgagttgagtacttgtacgagacttagcttagcggcggacgggtgagtaacgcgtgagcgacctggcctatacagggggataacagagagaaatttctgctaataccgcataagaccacagcactgcatggtacaggggtcaaaggagagattcggtataggatgggctcgcgtcccattagctagttggaggtgtaacggaccaccaaggcgacgatgggtagccgacctgagagggtgaccggccacactgggactgagacacggcccagactcctacgggaggcagcagtagggaatattggacaatggggggaaccctgatccagcaacgccgcgtgaaggaagaaggtcttcggattgtaaacttatgttgtcggggacgaaaagagacggtacccgacgaggaagccccggctaactacgtgccagcagccgcggtaatacgtagggggcgagcgttgtccggagttactgggcgtaaagggcgcgtaggcggcatattaagttagatgtgaaatccccgggcttaacctgggtgttgcatttaaaactgataagcttgagtgcaggagagggaagcggaattcctagtgtagcggtggaatgcgtagatattaggaggaacaccagtggcgaaggcggctttctggactgtaactgacgctgaggcgcgagagcgtggggagcaaacaggattagataccctggtagtccacgccgtaaacgatggatactaggtgtagagggtatcgaccccctctgtgccggagcaaacgcaataagtatcccgcctggggagtacggccgcaaggttgaaactcaaaggaattgacgggggcccgcacaagcagcggagcatgtggtttaattcgaagcaacgcgaagaaccttaccaaggcttgacatcctctgacgatgatagagatatcatttcccttcggggcagggagacaggtggtgcatggttgtcgtcagctcgtgtcgtgagatgttgggttaagtcccgcaacgagcgcaacccttgtatacagttaccagtattaagttagggactctgtatagactgccgtggataacacggaggaaggtggggacgacgtcaaatcatcatgccccttatgtcttgggctacacacgtgctacaatggccgcaacagagggcagcgagagggtaacctggagcgaatctcaaaaaagcggtctcagttcagattgtgggctgcaacccgcccacatgaagacggagttgctagtaatcgcggatcagcatgccgcggtgaatgcgttcccgggcct

SEQ ID NO: 3012 - DNA, 1357 bp, Artificial Sequence; identical to SEQ ID NO: 855
  Synthetic polymer

SEQ ID NO: 3013 - DNA, 1385 bp, Artificial Sequence; identical to SEQ ID NO: 310
  Synthetic polymer

SEQ ID NO: 3014 - DNA, 1400 bp, Artificial Sequence; identical to SEQ ID NO: 107
  Synthetic polymer

SEQ ID NO: 3015 - DNA, 1504 bp, Artificial Sequence; identical to SEQ ID NO: 32
  Synthetic polymer

SEQ ID NO: 3016 - DNA, 1396 bp, Artificial Sequence; identical to SEQ ID NO: 309
  Synthetic polymer

SEQ ID NO: 3017 - DNA, 1389 bp, Artificial Sequence; identical to SEQ ID NO: 336
  Synthetic polymer

SEQ ID NO: 3018 - DNA, 1388 bp, Artificial Sequence; identical to SEQ ID NO: 179
  Synthetic polymer

SEQ ID NO: 3019 - DNA, 1350 bp, Artificial Sequence; identical to SEQ ID NO: 419
  Synthetic polymer

SEQ ID NO: 3020 - DNA, 1343 bp, Artificial Sequence; identical to SEQ ID NO: 865
  Synthetic polymer
  misc_feature (914)..(916): n is a, c, g, or t

SEQ ID NO: 3021 - DNA, 1400 bp, Artificial Sequence; identical to SEQ ID NO: 253
  Synthetic polymer

SEQ ID NO: 3022 - DNA, 1410 bp, Artificial Sequence; identical to SEQ ID NO: 11
  Synthetic polymer
  misc_feature (12)..(12): n is a, c, g, or t

SEQ ID NO: 3023 - DNA, 1462 bp, Artificial Sequence; identical to SEQ ID NO: 39
  Synthetic polymer

SEQ ID NO: 3024 - DNA, 1496 bp, Artificial Sequence; identical to SEQ ID NO: 1051
  Synthetic polymer

SEQ ID NO: 3025 - DNA, 1491 bp, Artificial Sequence; identical to SEQ ID NO: 1400
  Synthetic polymer

SEQ ID NO: 3026 - DNA, 1470 bp, Artificial Sequence
  Synthetic polymer
agagtttgatcctggctcaggatgaacgctggcggcgtgcctaacacatgcaagtcgagcgatttccttcgggaaagagcggcggacgggtgagtaacgcgtgggtaacctgccctgtacacacggataacataccgaaaggtatgctaatacgagataaagtgctatgaagacatcttcgaagcaccaaagctttagcggtacaggatggacccgcgtctgattagctagttggtaaggtaacggcttaccaaggcgacgatcagtagccgacctgagagggtgatcggccacattggaactgagacacggtccaaactcctacgggaggcagcagtggggaatattgcacaatgggcgaaagcctgatgcagcaacgccgcgtgagcgatgaaggccttcgggtcgtaaagctctgtcctcaaggaagataatgacggtacttgaggaggaagccccggctaactacgtgccagcagccgcggtaatacgtagggggctagcgttatccggaattactgggcgtaaagggtgcgtaggtggttttttaagtcagaagtgaaaggctacggctcaaccgtagtaagcttttgaaactgagaaacttgagtgcaggagaggagagtagaattcctagtgtagcggtgaaatgcgtagatattaggaggaataccagttgcgaaggcggctctctggactgtaactgacactgaggcacgaaagcgtggggagcaaacaggattagataccctggtagtccacgccgtaaacgatgagtactagctgtcggaggttacccccttcggtggcgcagctaacgcattaagtactccgcctgggaagtacgctcgcaagagtgaaactcaaaggaattgacggggacccgcacaagtagcggagcatgtggtttaattcgaagcaacgcgaagaaccttacctaagcttgacatccttttgaccggtgcctaatagcatctttcccttcggggacaaaagtgacaggtggtgcatggttgtcgtcagctcgtgtcgtgagatgttgggttaagtcccgcaacgagcgcaacccttgcctttagttgccagcattaagttgggcactctagagggactgccagggataacctggaggaaggtggggacgacgtcaaatcatcatgccccttatgcttagggctacacacgtgctacaatgggtggtacagagggcagcaacgtcgtgaggccaagctaatcccttaaagccattctcagttcggattgtaggctgaaactcgcctacatgaagctggagttactagtaatcgcagatcagaatgctgcggtgaatgcgttcccgggtcttgtacacaccgcccgtcacaccacgggagttgggggcgcccgaagccacttagctaaccttttggaagcgagtgtcgaaggtgaaatcaataactggggtgaagtcgtaacaaggtagccgtatcg

SEQ ID NO: 3027 - DNA, 1423 bp, Artificial Sequence; identical to SEQ ID NO: 716
  Synthetic polymer

SEQ ID NO: 3028 - DNA, 1468 bp, Artificial Sequence
  Synthetic polymer
  misc_feature (252)..(252): n is a, c, g, or t
tgatcctggctcaggatgaacgctggcggcgtgcctaacacatgcaagtcgagcgatttacttcggtaaagagcggcggacgggtgagtaacgcgtgggtaacctgccctgtacacacggataacataccgaaaggtatgctaatacgggataatgtacttttgtcgcatggcaaaagtatcaaagctccggcggtacaggatggacccgcgtctgattagctagttggagaggtaatggctcaccaaggcnacgatcagtagccgacctgagagggtgatcggccacattggaactgagacacggtccaaactcctacgggaggcagcagtggggaatattgcacaatgggcgaaagcctgatgcagcaacgccgcgtgagcgatgaaggccttcgggtcgtaaagctctgtcctcaaggaagataatgacggtacttgaggaggaagccccggctaactacgtgccagcagccgcggtaatacgtagggggctagcgttatccggaattactgggcgtaaagggtgcgtaggtggtttcttaagtcagaggtgaaaggctacggctcaaccgtagtaagcctttgaaactgagaaacttgagtgcaggagaggagagtagaattcctagtgtagcggtgaaatgcgtagatattaggaggaataccagttgcgaaggcggctctctggactgtaactgacactgaggcacgaaagcgtggggagcaaacaggattagataccctggtagtccacgccgtaaacgatgagtactaggtgtcgggggttacccccctcggtgccgcagctaacgcattaagtactccgcctgggaagtacgctcgcaagagtgaaactcaaaggaattgacggggacccgcacaagtagcggagcatgtggtttaattcgaagcaacgcgaagaaccttacctaagcttgacatacttatgaccgatacctaatagtatttttcccttcggggacatgagatacaggtggtgcatggttgtcgtcagctcgtgtcgtgagatgttgggttaagtcccgcaacgagcgcaacccttgcctttagttgccagcattaagttgggcactctagagggactgccagggataacctggaggaaggtggggatgacgtcaaatcatcatgccccttatgcttagggctacacacgtgctacaatgggtggtacagagggcagccaagtcgtgaggcggagctaatcccttaaagccattctcagttcggattgtaggctgaaactcgcctacatgaagctggagttactagtaatcgcagatcagaatgctgcggtgaatgcgttcccgggtcttgtacacaccgcccgtcacaccacggaagttgggggcgcccgaagccagatagctaaccttttggaagcgtctgtcgaaggtgaaatcaataactggggtgaagtcgtaacaaggtagccgtatcggaag

SEQ ID NO: 3029 - DNA, 1396 bp, Artificial Sequence; identical to SEQ ID NO: 414
  Synthetic polymer

SEQ ID NO: 3030 - DNA, 1370 bp, Artificial Sequence
  Synthetic polymer
agagtttgatcctggctcaggacgaacgctggcggcgcgcctaacacatgcaagtcgaacgagagagagggagcttgcttcctcaatcgagtggcgaacgggtgagtaacgcgtgaggaacctgcctcaaagagggggacaacagttggaaacgactgctaataccgcataagcccacaggtcggcatccaccagagggaaaaggagcaatccgctttgagatggcctcgcgtccgattagctagttggtgaggtaatggcccaccaaggcgacgatcggtagccggactgagaggttgaacggccacattgggactgagacacggcccagactcctacgggaggcagcagtggggaatattgcacaatgggggaaaccctgatgcagcgacgccgcgtggaggaagaaggtcttcggattgtaaactcctgttgttgaggaagataatgacggtactcaacaaggaagtgacggctaactacgtgccagcagccgcggtaaaacgtaggtcacaagcgttgtccggaattactgggtgtaaagggagcgcaggcgggaagacaagttggaagtgaaatctatgggctcaacccataaactgctttcaaaactgtttttcttgagtagtgcagaggtaggcggaattcccggtgtagcggtggaatgcgtagatatcgggaggaacaccagtggcgaaggcggcctactgggcaccaactgacgctgaggctcgaaagtgtgggtagcaaacaggattagataccctggtagtccacaccgtaaacgatgattactaggtgttggagtattgaccccttcagtgccgcagttaacacaataagtaatccacctggggagtacgaccgcaaggttgaaactcaaaggaattgccgggggcccgcacaagcagtggagtatgtggtttaattcgacgcaacgcgaagaaccttaccaagtcttgacatcctgtgaggatgctggcaacattattttccttcgggacgcagagacaggtggtgcatggttgtcgtcagctcgtgtcgtgagatgttgggttaagtcccgcaacgagcgcaacccttactgtcagttagtacgcaagaggcctttggcaggactgccgttgacaaaacggaggaaggtggggatgacgtcaaatcatcatgccccttatgacttgggctacccacgtactacaatggcgttaaacaaagagaagcaagaccgcgaggtggagcaaatctcagaaacaacgtcccagttcggactgcagtctgcaactcgcctgcacgaagtcggaattgctagtaatcgtggatcagcatgccacggtgaatacgttcccgggccttgcacacaccgcccgtca

SEQ ID NO: 3031 - DNA, 1386 bp, Artificial Sequence; identical to SEQ ID NO: 197
  Synthetic polymer

SEQ ID NO: 3032 - DNA, 1338 bp, Artificial Sequence; identical to SEQ ID NO: 800
  Synthetic polymer

SEQ ID NO: 3033 - DNA, 1371 bp, Artificial Sequence; identical to SEQ ID NO: 334
  Synthetic polymer

SEQ ID NO: 3034 - DNA, 1334 bp, Artificial Sequence; identical to SEQ ID NO: 779
  Synthetic polymer

SEQ ID NO: 3035 - DNA, 1347 bp, Artificial Sequence
  Synthetic polymer
agagtttgatccggctcaggacgaacgctggcggcgcgcctaacacatgcaagtcgaacgaagtcaagaggagcttgctctttttgacttagtggcgaacgggtgagtaacgcgtgaggaacctgcctcaaagagggggacaacagttggaaacgactgctaataccgcataagcccacagctccgcatggagcagagggaaaaggagcaatccgctttgagatggcctcgcgtccgattagctagttggtgaggtaacggcccaccaaggcgacgatcggtagccggactgagaggttgatcggccacattgggactgagacacggcccagactcctacgggaggcagcagtggggaatattgcacaatgggggaaaccctgatgcagcgacgccgcgtggaggaagaaggtcttcggattgtaaactcctgttgttggggaagataatgacggtacccaacaaggaagtgacggctaactacgtgccagcagccgcggtaaaacgtaggtcacaagcgttgtccggaattactgggtgtaaagggagcgcaggcgggaagacaagttggaagtgaaatctatgggctcaacccataaactgctttcaaaactgtttttcttgagtagtgcagaggtaggcggaattcccggtgtagcggtggaatgcgtagatatcgggaggaacaccagtggcgaaggcggcctactgggcaccaactgacgctgaggctcgaaagtgtgggtagcaaacaggattagataccctggtagtccacactgtaaacgatgattactagggggtgggggggaattgacccccctccatggccccagttaacacaactaagtaatcccacctggggagtacgccctcaaggttgcaactcaagagaattgacggggggcccgcgcaagcagtggagtatgtggtttaattcgacgcaacgcgaagatcctttccaagtctggacatcctgcgtcgatgctagaaatagtattttccttcgggacgcagagacaggtggtgcatggttgtcgtcagctcgtgtcgtgagatgttgggtgaagtcccgcaacgagcgcaacccctatggtcagttactacgcaagaggactctggccagactgccgttgacaaaacggaggaaggtggggatgacgtcaaatcattatgccctttatgacttgggctacacacgtactacaatggcgtttaacaaagagaagcgaagtcgcgaggcagagcaaaactcagaaacaacgtcccagttcggactgcaggctgcaactcgcctgcacgaagtcggaattgctagtaatcgcagatcagcatgctgcggtgaat

SEQ ID NO: 3036 - DNA, 1371 bp, Artificial Sequence; identical to SEQ ID NO: 776
  Synthetic polymer

SEQ ID NO: 3037 - DNA, 1374 bp, Artificial Sequence; identical to SEQ ID NO: 772
  Synthetic polymer

SEQ ID NO: 3038 - DNA, 1372 bp, Artificial Sequence; identical to SEQ ID NO: 272
  Synthetic polymer

SEQ ID NO: 3039 - DNA, 1359 bp, Artificial Sequence
  Synthetic polymer
  misc_feature (90)..(90): n is a, c, g, or t
gtcgtccttagagtttgatcctggctcaggaccaacgctggtggcgcgcctaacacatgcaagtcgaacgagcgagagagagcttgcttnctcaagcgagtggccaacgggtaatttacgcgtgaggaacctgcctcaaagagggggacaacagttggaaacgactgctaataccgcataagcccacagctcggcatcgagcagagggaaaaggagcaatccgctttgagatggcctcgcgtccgattagctagttggtgaggtaacggcccaccaaggcgacgatcggtagccggactgagaggttgaacggccacattgggactgagacacgggccagactcctacgggaggcagcagtggggaatattgcacaatgggggaaaccctgatgcagcgacgccacgtggaggaagaaggtcttcggattgtaaactcctgttgttgaggaagataatgacggtactcaacaaggaagtgacggctaactacgtgccagcagccgcggtaaaacgtaggtcacaagcgttgtccggaattactgggtgtaaagggagcgcaggcgggaagacaagttggaagtgaaatctatgggctcaacccataaaccgctttcaaaacggtgtatcttgagtagtgcagaggtagcgggaattcccggtgtagcggtggaatgcgtagatatcgggaggaacaccagtggcgaaggcgggctactgggcaccaactgacgctgaggctcgaaagtgtgggtagcaaacaggattagataccctggtagtccacaccgtaaacgatgattactaggtgttggaggattgaccccttcagtgccgcagttaacacaataagtaatccacctggggagtacgaccgcaaggttgaaactcaaaggaattgacgggggcccgcacaagcagtggagtatgtggtttaattcgacgcaacgcgaagaaccttaccaagtcttgacatcctgcgacggacatagaaatatgtctttccttcgggacgcagagacaggtggtgcatggttgtcgtcagctcgtgtcgtgagatgttgggttaagtcccgcaacgagcgcaacccttactgtcagttactacgcaagaggactctggcaggactgctgttgacaaaacggaggaaggtgggggtgacgtcaaatcatcatgccctttatgacttgggctacacacgtactacaatggcgttaaacaaagagaagcaagaccgcgaggtggagcaaaactcagaaacaacgtcccagttcggactgcaggctgcaactcgcctgcgcgaagtcggaattgctagtaatcgtggatcagcatgccacggtgaatacgttcccgggc

SEQ ID NO: 3040 - DNA, 1421 bp, Artificial Sequence; identical to SEQ ID NO: 989
  Synthetic polymer

SEQ ID NO: 3041 - DNA, 1377 bp, Artificial Sequence; identical to SEQ ID NO: 349
  Synthetic polymer

SEQ ID NO: 3042 - DNA, 1375 bp, Artificial Sequence; identical to SEQ ID NO: 133
  Synthetic polymer

SEQ ID NO: 3043 - DNA, 1360 bp, Artificial Sequence; identical to SEQ ID NO: 715
  Synthetic polymer

SEQ ID NO: 3044 - DNA, 1430 bp, Artificial Sequence
  Synthetic polymer
gacgaacgctggcggcgcgcctaacacatgcaagtcgaacgagagagagggagcttgcttccttgatcgagtggcgaacgggtgagtaacgcgtgaggaacctgcctcaaagagggggacaacagttggaaacgactgctaataccgcataagcccacgacccggcatcgggaagagggaaaaggagcaatccgctttgagatggcctcgcgtccgattagctagttggtgaggtaacggcccaccaaggcgacgatcggtagccggactgagaggttgaacggccacattgggactgagacacggcccagactcctacgggaggcagcagtggggaatattgcacaatgggggaaaccctgatgcagcgacgccgcgtggaggaagaaggtcttcggattgtaaactcctgttgttgaggaagataatgacggtactcaacaaggaagtgacggctaactacgtgccagcagccgcggtaaaacgtaggtcacaagcgttgtccggaattactgggtgtaaagggagcgcaggcgggaagacaagttggaagtgaaatctatgggctcaacccataaactgctttcaaaactgtttttcttgagtagtgcagaggtaggcggaattcccggtgtagcggtggaatgcgtagatatcgggaggaacaccagtggcgaaggcggcctactgggcaccaactgacgctgaggctcgaaagtgtgggtagcaaacaggattagataccctggtagtccacaccgtaaacgatgattactaggtgttggaggattgaccccttcagtgccgcagttaacacaataagtaatccacctggggagtacgaccgcaaggttgaaactcaaaggaattgacgggggcccgcacaagcagtggagtatgtggtttaattcgacgcaacgcgaagaaccttaccaagtcttgacatcctgcgacgatgctggaaacagtattttccttcgggacgcagagacaggtggtgcatggttgtcgtcagctcgtgtcgtgagatgttgggttaagtcccgcaacgagcgcaacccttactgtcagttactacgcaagaggactctggcaggactgccgttgacaaaacggaggaaggtggggatgacgtcaaatcatcatgccctttatgacttgggctacacacgtactacaatggcgttaaacaaagagaagcaagaccgcgaggtggagcaaaactcagaaacaacgtcccagttcggactgcaggctgcaactcgcctgcacgaagtcggaattgctagtaatcgtggatcagcatgctgcggtgaatacgttcccgggtcttgtacacaccgcccgtcacaccatgggagtcggaaacgcccgaagtcagtgacccaaccgcaaggagggagctgccgaaggcaggttcgataactggg

SEQ ID NO: 3045 - DNA, 1348 bp, Artificial Sequence; identical to SEQ ID NO: 706
  Synthetic polymer

SEQ ID NO: 3046 - DNA, 1428 bp, Artificial Sequence; identical to SEQ ID NO: 73
  Synthetic polymer

SEQ ID NO: 3047 - DNA, 1425 bp, Artificial Sequence; identical to SEQ ID NO: 988
  Synthetic polymer

SEQ ID NO: 3048 - DNA, 1372 bp, Artificial Sequence; identical to SEQ ID NO: 174
  Synthetic polymer

SEQ ID NO: 3049 - DNA, 1376 bp, Artificial Sequence; identical to SEQ ID NO: 207
  Synthetic polymer

SEQ ID NO: 3050 - DNA, 1357 bp, Artificial Sequence
  Synthetic polymer
  misc_feature (757)..(757): n is a, c, g, or t
  misc_feature (1300)..(1300): n is a, c, g, or t
  misc_feature (1310)..(1311): n is a, c, g, or t
  misc_feature (1320)..(1320): n is a, c, g, or t
  misc_feature (1339)..(1339): n is a, c, g, or t
  misc_feature (1351)..(1351): n is a, c, g, or t
ttcgcccttagagttgatcctggctcccgacgaacgttggcggcgcgcctaacacatgcaagtcgaacgagcgagagagagcttgctttctcaagcgcgtggcgaactggtgagtaacgcgtgaggaacctgcctcaaagagggggacaacagttggaaacgactgctaataccgcataagcccacagctcggcatcgagcagagggaaaaggagcaatccgctttgagatggcctcgcgtccgattagctagttggtgaggtaatggcccaccaaggcgacgatcggtagccggactgagaggttgaacggccacattgggactgagacacggcccagactcctacgggaggcagcagtggggaatattgcacaatgggggaaaccctgatgcagcgacgccgcgtggaggaagaaggtcttcggattgtaaactcctgttgttgaggaagataatgacggtactcaacaaggaagtgacggctaactacgtgccagcagccgcggtaaaacgtaggtcacaagcgttgtccggaattactgggtgtaaaggaagcgcaggcgggaagacaagttggaagtgaaatctatgggctcaacccataaactgctttcaaaactgtttttcttgagtagtgcagaggtaggcggaattcccggtgtagcggtggaatgcgtagatatcgggaggaacaccagtggcgaaggcggcctactgggcacccactgacgctgaggctcgaaagtgtgggtagcnaacaggattagataccctgttagtccacaccgtaaccgatgatacttaggtgttggaggattgaccccttcagtcccgcagttaacacaataagtaatccacctggggagtaccgaccgcaaggttgaaactcaaaggaattgacgggggcccgcacaagcagtggagtatgtggtttaattcgacgctacgcgaagaaccttaccaagtcttgacatcccttgacgaacatagaaatatgttttctcttcggagcaaggagacaggtggtgcatggttgtcgtcagctcgtgtcgtgagatgttgggtcccgtcccgcaacgagcgcaacccttactgtcagttactacgcaagaggactctggcaggactgccgttgacaaaacggaggaaggtggggatgacgtcaaatcatcatgccctttatgacttgggctacacacgtactacaatggcgttaaacaaagagaagcaagaccgcgaggtggagcaaaactcagaaacaacgtcccagttcggactgcaggctgccacacgcctgcncggagtcggnnttgctagtnttcgtggatcagcatgccncgggatacgttnccgggc

SEQ ID NO: 3051 - DNA, 1419 bp, Artificial Sequence; identical to SEQ ID NO: 933
  Synthetic polymer

SEQ ID NO: 3052 - DNA, 1375 bp, Artificial Sequence; identical to SEQ ID NO: 232
  Synthetic polymer

SEQ ID NO: 3053 - DNA, 1384 bp, Artificial Sequence; identical to SEQ ID NO: 1065
  Synthetic polymer

SEQ ID NO: 3054 - DNA, 1377 bp, Artificial Sequence
  Synthetic polymer
ttagagtttgatcctggctcaggacgaacgctggcggcgcgcctaacacatgcaagtcgaacgagcgagagagagcttgctttctcaagcgagtggcgaacgggtgagtaacgcgtgaggaacctgcctcaaagagggggacaacagttggaaacgactgctaataccgcataagcccacgacccggcatcgggtagagggaaaaggagaaatccgctttgagatggcctcgcgtccgattagctagttggtgaggtaacggcccaccaaggcgacgatcggtagccggactgagaggttgaacggccacattgggactgagacacggcccagactcctacgggaggcagcagtggggaatattgcacaatggggggaaccctgatgcagcgacgccgcgtggaggaagaaggtcttcggattgtaaactcctgttgttgaggaagataatgacggtactcaacaaggaagtgacggctaactacgtgccagcagccgcggtaaaacgtaggtcacaagcgttgtccggaattactgggtgtaaagggagcgcaggcgggaagacaagttggaagtgaaatccatgggctcaacccatgaactgctttcaaaactgtttttcttgagtagtgcagaggtaggcggaattcccggtgtagcggtggaatgcgtagatatcgggaggaacaccagtggcgaaggcggcctactgggcaccaactgacgctgaggctcgaaagtgtgggtagcaaacaggattagataccctggtagtccacaccgtaaacgatgattactaggtgttggagggattgaccccttcagtgccgcagttaacacaataagtaatccacctggggagtacgaccgcaaggttgaaactcataggaattgacgggggcccgcacaagcggtggattatgtggtttaattcgaagcaacgcgaagaaccttaccagggtttgacatcctgctaacgaagtagagatacattaggtgcccttcggggaaagcagagacaggtggtgcatggttgtcgtcagctcgtgtcgtgagatgttgggttaagtcccgcaacgagcgcaacccctattgttagttgctacgcaagagcactctagcgagactgccgttgacaaaacggaggaaggtggggacgacgtcaaatcatcataccccttatatcctgggctacacacgtaatacaatggcggtcaacagagggaagcaaagccgcgaggcagagcaaacccccaaaagccgtcccagttcggattgtaggctgcaactcgcctgcatgaagtcggaatcgctagtaatcgcggatcagcatgccgcggtgaatacgttcccgggccttgcactcaccgcccgtca

SEQ ID NO: 3055 - DNA, 1380 bp, Artificial Sequence; identical to SEQ ID NO: 434
  Synthetic polymer

SEQ ID NO: 3056 - DNA, 1354 bp, Artificial Sequence; identical to SEQ ID NO: 777
  Synthetic polymer

SEQ ID NO: 3057 - DNA, 1357 bp, Artificial Sequence; identical to SEQ ID NO: 317
  Synthetic polymer

SEQ ID NO: 3058 - DNA, 1379 bp, Artificial Sequence; identical to SEQ ID NO: 182
  Synthetic polymer

SEQ ID NO: 3059 - DNA, 1371 bp, Artificial Sequence; identical to SEQ ID NO: 602
  Synthetic polymer

SEQ ID NO: 3060 - DNA, 1449 bp, Artificial Sequence; identical to SEQ ID NO: 58
  Synthetic polymer

SEQ ID NO: 3061 - DNA, 1378 bp, Artificial Sequence; identical to SEQ ID NO: 641
  Synthetic polymer

SEQ ID NO: 3062 - DNA, 1373 bp, Artificial Sequence
  Synthetic polymer
agagtttgatcctggctcaggacgaacgctggcggcgcgcctaacacatgcaagtcgaacggacgaggaggagcttgcttctccaagtcagtggcggacgggtgagtaacgcgtgagtaacctgcccttcagagggggataacgtctggaaacggacgctaataccgcatgacatatttccatcgcatggtggagatatcaaaggagcaatccgctgaaggatggactcgcgtccgattagatagttggcggggtaacggcccaccaagtcgacgatcggtagccggactgagaggttgaacggccacattgggactgagacacggcccagactcctacgggaggcagcagtggggaatattgcacaatgggggaaaccctgatgcagcgacgccgcgtggaggaagaaggtcttcggattgtaaactcctgttgttgaggaagataatgacggtactcaacaaggaagtgacggctaactacgtgccagcagccgcggtaaaacgtaggtcacaagcgttgtccggaattactgggtgtaaagggagcgcaggcgggagaacaagttggaagtgaaatccatgggctcaacccatgaactgctttcaaaactgtttttcttgagtagtgcagaggtaggcggaattcccggtgtagcggtggaatgcgtagatatcgggaggaacaccagtggcgaaggcggcctactgggcaccaactgacgctgaggctcgaaagtgtgggtagcaaacaggattagataccctggtagtccacaccgtaaacgatgattactaggtgttggaggattgaccccttcagtgccgcagttaacacaataagtaatccacctggggagtacgaccgcaaggttgaaactcaaaggaattgacgggggcccgcacaagcggtggagtatgtggtttaattcgaagcaacgcgaagaaccttaccagggcttgacatcccggtgaccggtgtagagatacaccttcttcttcggaagcgccggtgacaggtggtgcatggttgtcgtcagctcgtgtcgtgagatgttgggttaagtcccgcaacgagcgcagcccttattgttagttgctacgcaagagcactctagcgagactgccgttgacaaaacggaggaaggtggggacgacgtcaaatcatcatgccccttatgtcctgggccacacacgtactacaatggtggtcaacagagggaagcaagaccgcgaggtggagcaaacccctaaaagccatcccagttcggattgcaggctgcaactcgcctgtatgaagttggaatcgctagtaatcgcggatcagcatgccgcggtgaatacgttcccgggccttgcacacaccgcccgtca

SEQ ID NO: 3063 - DNA, 1372 bp, Artificial Sequence; identical to SEQ ID NO: 306
  Synthetic polymer

SEQ ID NO: 3064 - DNA, 1378 bp, Artificial Sequence; identical to SEQ ID NO: 435
  Synthetic polymer

SEQ ID NO: 3065 - DNA, 1367 bp, Artificial Sequence; identical to SEQ ID NO: 586
  Synthetic polymer

SEQ ID NO: 3066 - DNA, 1423 bp, Artificial Sequence; identical to SEQ ID NO: 1130
  Synthetic polymer

SEQ ID NO: 3067 - DNA, 1379 bp, Artificial Sequence; identical to SEQ ID NO: 578
  Synthetic polymer

SEQ ID NO: 3068 - DNA, 1373 bp, Artificial Sequence; identical to SEQ ID NO: 352
  Synthetic polymer

SEQ ID NO: 3069 - DNA, 1393 bp, Artificial Sequence; identical to SEQ ID NO: 254
  Synthetic polymer

SEQ ID NO: 3070 - DNA, 1379 bp, Artificial Sequence; identical to SEQ ID NO: 364
  Synthetic polymer

SEQ ID NO: 3071 - DNA, 1378 bp, Artificial Sequence; identical to SEQ ID NO: 406
  Synthetic polymer

SEQ ID NO: 3072 - DNA, 1386 bp, Artificial Sequence; identical to SEQ ID NO: 205
  Synthetic polymer

SEQ ID NO: 3073 - DNA, 1370 bp, Artificial Sequence; identical to SEQ ID NO: 112
  Synthetic polymer

SEQ ID NO: 3074 - DNA, 1360 bp, Artificial Sequence; identical to SEQ ID NO: 355
  Synthetic polymer

SEQ ID NO: 3075 - DNA, 1395 bp, Artificial Sequence; identical to SEQ ID NO: 264
  Synthetic polymer

SEQ ID NO: 3076 - DNA, 1376 bp, Artificial Sequence; identical to SEQ ID NO: 450
  Synthetic polymer

SEQ ID NO: 3077 - DNA, 1377 bp, Artificial Sequence; identical to SEQ ID NO: 275
  Synthetic polymer

SEQ ID NO: 3078 - DNA, 1392 bp, Artificial Sequence; identical to SEQ ID NO: 707
  Synthetic polymer

SEQ ID NO: 3079 - DNA, 1426 bp, Artificial Sequence
  Synthetic polymer
gcgcgcctaacacatgcaagtcgaacgaagtccttaggagcttgctctttttgacttaatggcgaacgggtgagtaacgcgtgaggaacctgcctcaaagagggggacaacagttggaaacgactgctaataccgcataggcccacagctccgcatggagcagagggaaaaggagcaatccgctttgagatggcctctcgtccgattacctagttggtgaggtaacggcccaccaaggcgacgatcggtagccggactgagaggttgatcggccacattgggactgacacacggaccaaactcctaccggaggcaccagtggggaatattgcacaatgggggaaaccctgatgcaacgactccgcgtggaggaacaaggtcttcagattgtaaactcctgttgttggggaagataatgacggtacccaacagggaagtgacggctaactacgtgccaccagccgcggtaaaacgtacgtcacaagcgttgtccggaattactgggtgtaaagggagcgcaggcgggaagacaagttggaagtgaaatctatgggctcaacccataaactgctttcaaaactgtttttcttgagtagtgcaaatgtaggcggaattcccggtgtagcggtggaatgcgtacatatcgggaggaacaccagtggcgaacgcggcctactgagcaccaactgacgctgaggctcgaaagtgtgggtagcaaacaggattagataccctggtagtccacactgtaaacgatgattactaggtgttgggggattgacgccatcagttccgcagttaacacaataagtaatccacttggggagtaggaccgcaaggtagaaactcaaaggaattgacgggggcccgcacaaccagtggagtatgtggtgtaatttgatgcaacgagaagagcggtaccaagtcttgacatcatgcgacgtgcatagaaatatgtatatcattcgggacgcagagccaggtggtgcatggttgtcgtcagtctagtgtcgtgagatgtggggttaagtaacgcaacgagcgcaacccctatggtcagttagtacgcaagaggactctggccagattgccggagacaaaacggaggaaggtggggaaggggtcaaatcatcataccttttatgactcgggatacacacgtactccaatggcgtttaacaaagagaagagaagtcgcgaggcagagcaaaagtcagaaacaacgtcccagtttggaatgcaggatgcaagtcgcctgcacgaagtcggaatcgctagtaatcgcagatcagcatgttgcgcagaatacgttgccgggctttgtacacaccgcccgtcacaccatgagagccggggggaccggaagtcggtagtgtaactgtaaggaggaagccgccgaaggtaaaactggtgattggggtgaagt

SEQ ID NO: 3080 - DNA, 1373 bp, Artificial Sequence
  Synthetic polymer
agagtttgatcctggctcaggacgaacgctggcggcgcgcctaacacatgcaagtcgaacgagagagagggagcttgcttcctcaatcgagtggcgaacgggtgagtaacgcgtgaggaacctgcctcaaagagggggacaacagttggaaacgactgctaataccgcataagcccacaggtcggcatcgaccagagggaaaaggagcaatccgctttgagatggcctcgcgtccgattagctagttggtgaggtaacggcccaccaaggcaacgatcggtagccggactgagaggttgaacggccacattgggactgagacacggcccagactcctacgggaggcagcagtggggaatattgcacaatgggggaaaccctgatgcagcgacgccgcgtggaggaagaaggtcttcggattgtaaactcctgttgttgaggaagataatgacggtactcaacaaggaagtgacggctaactacgtgccagcagccgcggtaaaacgtaggtcacaagcgttgtccggaattactgggtgtaaagggagcgcaggcgggaagacaagttggaagtgaaatctatgggctcaacccataaactgctttcaaaactgtttttcttgagtagtgcagaggtaggcggaattcccggtgtagcggtggaatgcgtagatatcgggaggaacaccagtggcgaaggcggcctactgggcaccaactgacgctgaggctcgaaagtgtgggtagcaaacaggattagataccctggtagtccacaccgtaaacgatgattactaggtgtggaaggattgaccccttcagtgccgcagttaacacaataagtaatccacctggggagtacgaccgcaaggttgaaactcaaaggaattgacgggggcccgcacaaagcagtggagtatgtggtttaattcgaagcaacgcgaagaaccttaccaggtcttgacatcctgagaatccttaagagattagggagtgccttcgggaactcagagacaggtggtgcatggttgtcgtcagctcgtgtcgtgagatgttgggttaagtcccgcaacgagcgcaacccttgctattagttgctacgcaagagcactctaataggactgccgttgacaaaacggaggaaggtggggatgacatcaaatcatcatgccctttatgacttgggctacacgcgtactacaatggcgttaaacaaagagaagcaagaccgcgaggtggagcaaaactcagaaacaacgtcccagttcggactgcaggctgcaactcgcctgcacgaagtcggaattgctagtaatcgcagatcagcatgctgcggtgaatacgttcccgggccttgtacacaacgcccgtca

SEQ ID NO: 3081 - DNA, 1340 bp, Artificial Sequence; identical to SEQ ID NO: 755
  Synthetic polymer

SEQ ID NO: 3082 - DNA, 1373 bp, Artificial Sequence; identical to SEQ ID NO: 90
  Synthetic polymer

SEQ ID NO: 3083 - DNA, 1377 bp, Artificial Sequence
  Synthetic polymer
  misc_feature (125)..(125): n is a, c, g, or t
  misc_feature (301)..(301): n is a, c, g, or t
  misc_feature (339)..(339): n is a, c, g, or t
  misc_feature (356)..(356): n is a, c, g, or t
  misc_feature (359)..(359): n is a, c, g, or t
  misc_feature (396)..(396): n is a, c, g, or t
  misc_feature (758)..(758): n is a, c, g, or t
ttcgcccttagagtttggtcctggctcaggacgaacgctggcggcgcgcctaacacatgcaagtcgaacgagagagaaggagcttgcttcttcgatcgagtggcgaacgggggagggcgcgtgangaacctgcctcaaagagggggacaacaggtggaaacgactgctaataccgcataagcccacgggtcggcatcgaccagagggaaaaggagtgatccgctttgagatggcctcgcgtccaattagctagttggtgaggtaacggcccaccaaggcgacgatcggtagccggactganaggttgaacggccacgtggggactgagacacggcccanactcctacgggaggcancangggggaatattgcacaatgggggaaaccctgatgcancgacgccgcgtggaggaagaaggtcttcggattgtaaactcctgttgttgaggaagataatgacggtactcaacaaggaagtgacggctaactacgtgccagcagccgcggcaaaacgtaggtcacaagcgttgtccggaattactgggtgtaaagggagcgcacgcgggaagacaagttggaagtgaaatccatgggctcaacccatgaactgctttcaaaactgtttttcttgactactgcacacgtacgcggaattcccggtgtagcggtggaatgcgtagatatcgggaggaacaccagtggcgaaggcggcctactgggcaccaactgacgctgaggctcgaaagtgtgggtagcanacaggattagataccctggtagtccacaccgtaaacgatgattactaggtgttggaggattgaccccttcagtgccgcagttaacacaataagtaatccacctggggagtacgaccgcaaggttgaaactcaaaggaattgacgggggcccgcacaagcagtggagtatgtggtttaattcgacgcaacgcgaagaaccttaccaagtcttgacatcctgcgacgatgctagaaatagtattttccttcgggacgcagagacaggtggtgcatggttgtcgtcagctcgtgtcgtgagatgttgggttaagtcccgcaacgagcgcaacccttatggtcagttactacgcaagaggactctggccagactgccgttgacaaaacggaggaaggtggggatgacgtcaaatcatcatgccctttatgacttgggctacacacgtactacaatggcgttaaacaaagagaagcaagaccgcgaggtggagcaaaactcagaaacaacgtcccagttcggactgcaggctgcaactcgcctgcacgaagtcggaattgctagtaatcgtggatcagcatgccacggtgaatacgttcccgggccttgtacacaccgcccgtc

SEQ ID NO: 3084 - DNA, 1379 bp, Artificial Sequence; identical to SEQ ID NO: 94
  Synthetic polymer

SEQ ID NO: 3085 - DNA, 1377 bp, Artificial Sequence; identical to SEQ ID NO: 239
  Synthetic polymer

SEQ ID NO: 3086 - DNA, 1386 bp, Artificial Sequence
  Synthetic polymer
ttcgcccttagagtttgatcctggctcaggacgaacgctggcggcgcgcctaacacatgcaagtcgaacgagcgagagagagcttgctttctcgagcgagtggcgaacgggtgagtaacgcgtgaggaacctgcctcaaagagggggacaacagttggaaacgactgctaataccgcataagcccacagctcggcatcgagcagagggaaaaggagcaatccgctttgagatggcctcgcgtccgattagctagttggtgaggtaatggcccaccaaggcaacgatcggtagccggactgagaggttgaacggccacattgggactgagacacggcccagactcctacgggaggcagcagtggggaatattgcacaatgggggaaaccctgatgcagcgacgccgcgtggaggaagaaggtcttcggattgtaaactcctgttgttgaggaagataatgacggtactcaacaaggaagtgacggctaactacgtgccagcagccgcggtaaaacgtaggtcacaagcgttgtccggaattactgggtgtaaagggagcgcaggcgggaagacaagttggaagtgaaatctatgggctcaacccataaactgctttcaaaactgtttttcttgagtagtgcagaggtaggcggaattcccggtgtagcggtggaatgcgtagatatcgggaggaacaccagtggcgaaggcggcctactgggcaccaactgacgctgaggctcgaaagtgtgggtagcaaacaggattagataccctggtagtccacaccgtaaacgatgattactaaggtgttgggaggaattgaccccttcagtgccgcagttaactccatttagttatccacggggggggagcgtccgcaaggttgaaactcaaaggatttgacggggggcccgcacaagcagtgggagtatttggtttaattcgaacgcaacgcgaagttccttatcaagtctggaaatcctgcgacgatgcgggaaacagtattttccttcgggacgcagagacaggtggtgcatggttgtcgtcagctcgtgtcgtgagatgttgggttaagtcccgcaacgagcgcaacccttactgtcagttactacgcaagaggactctggcaggactgccgttgacaaaacggaggaaggtggggatgacgtcaaatcatcatgccctttatgacttgggctacacacgtactacaatggcgttaaacaaagagaagcaagaccgcgaggtggagcaaaactcagaaacaacgtcccagttcggactgcaggctgcaactcgcctgcacgaagtcggaattgctagtaatcgtggatcagcatgccacggtgaatacaaacccgggccttgcacacaccgcccgtca

SEQ ID NO: 3087 - DNA, 1389 bp, Artificial Sequence; identical to SEQ ID NO: 398
  Synthetic polymer

SEQ ID NO: 3088 - DNA, 1374 bp, Artificial Sequence; identical to SEQ ID NO: 229
  Synthetic polymer

SEQ ID NO: 3089 - DNA, 1369 bp, Artificial Sequence; identical to SEQ ID NO: 387
  Synthetic polymer

SEQ ID NO: 3090 - DNA, 1416 bp, Artificial Sequence
  Synthetic polymer
acgctggcggcgcgcctaacacatgcaagtcgaacgagagagaaggagcttgcttcttcgatcgagtggcgaacgggtgagtaacgcgtgaggaacctgcctcaaagagggggacaacggttggaaacgactgctaataccacataaccccacgggtcggcatcgacctgagggaaaaggagcaatccgctttgagatggcctcgcgtccgattagctagttggtgaggtaacggcccaccaaggcgacgatcggtagccggactgagaggttgaacggccacattgggactgacacacggcccagactcctacgggaggcagcagtggggaatattgcacaatgggggaaaccctgatgcagcgacgccgcgtggaggaagaaggtcttcggattgtaaactcctgttgttgaggaagataatgacggtactcaacaaggaagtgacggctaactacatgccagcagccgcggtaaaacgtaggtcacaagcgttgtccggaattactgggtgtaaagggagcgcaagcgggaagacaagttggaagtgaaatctatgggctcaacccataaactgctttcagaactgtttttcttgagtagtgcaaaggtaggcggaattcccggtgtagcggtggaaatgcgtagatatcgggaggaacaccagtggcgaaagcggcctactgggcaccaactgacgctgaggctcgaaagtgtgggtagcaaactggattagataccgtggtagtccacaccgtaaccgatgattactaggtgttggaggattgaccccttcagtgccgcagttaacacaataagtaatccacctggggagtaggaccgcaaggttgaaactcaaaggaattgacgggggcccgcacaagcagtggagtatgtggtttaatttgacgcaacgcgaagaaccttaccaagtcttgacatcttgcgacgatgctagaaatagtattttctttcgggacgcagagacaggtggtgcatggttgtcgtcagctcgtgtcgtgagatgttgggttaagtcccgcaacgagcgcaacccttatggtcagttactacgcaagaggactctggccagactgccgttgacaaaacggaggaaggtggggatgacgtcaaatcatcatgccctttatgacttgggctacacacgtacaacaatggcgttaaacaaagagaagcaagaccgcgaggtggagcaaaactcagaaacaacgtcccagttcggaatgcaggctgcaactcgcctgcacgaagtcggaattgctagtaatcgtggatcagcatgccacggtgaatacgttcccgggccttgtacacaccgcccgtcacaccatgagagccggggggacccgaagtcgatagtctaaccgtaaggaggactccgccgaaggtaaaact

SEQ ID NO: 3091 - DNA, 1429 bp, Artificial Sequence; identical to SEQ ID NO: 1074
  Synthetic polymer

SEQ ID NO: 3092 - DNA, 1355 bp, Artificial Sequence; identical to SEQ ID NO: 797
  Synthetic polymer

SEQ ID NO: 3093 - DNA, 1474 bp, Artificial Sequence; identical to SEQ ID NO: 481
  Synthetic polymer

SEQ ID NO: 3094 - DNA, 1424 bp, Artificial Sequence
  Synthetic polymer
  misc_feature (541)..(541): n is a, c, g, or t
gctggcggcgcgcctaacacatgcaagtcgaacgagcgagagagagcttgctttctcgagcgagtggcgaacgggtgagtaacgcgtgaggaacctgcctcaaagagggggacaacagttggaaacgactgctaataccgcataagcccacgacccggcatcgggaagagggaaaaggagcaatccgctttgagatggcctcgcgtccgattagctagttggtgaggtaacggcccaccaaggcgacgatcggtagccggactgagaggttggacggccacattgggactgagacacggcccagactcctacgggaggcagcggtggggaatattgcacaatgggggaaaccctgatgcagcgacgccgcgtggaggaagaaggtcttcggattgtaaactcctgttgttgaggaagataatgacggaactcaaccaggaactgacggctaactacgtgccagcagccgcggtaaaacgtaggtcacaagcgtgttccggaattactggtggtaaagggagcgcaggcggaaagacaagtnggaagtgaaatccatgggctcaacccatgaactgctttcaaaactgtttttcttgagtagtgcagaggtaggcggaattcccggtgtagcggtggaatgcgtagatatcgggaggaacaccagtggcgaaggcggcctactaggcaccaactgacgctgaggctcgaaagtgtgggtagcaaacaggattagataccctggtagtccacaccgtaaacgatgattactaggtgttggaggattgaccccttcagtgccgcagttaacacaataagtaatccacctggggagtacgaccgcaaggttgaaactcaaaggaattgacgggggcccgcacaagcagtggagtatgtggtttaattcgacgcaacgcgaagaaccttaccaagtcttgacatcccttgacggtgctggaaacagtatttctcttcggagcaaggagacaggtggtgcatggttgtcgtcagctcgtgtcgtgagatgttgggttaagtcccgcaacgagcgcaacccttatggtcagttactacgcaagaggactctggccagactgccgttgacaaaacggaggaaggtggggatgacgtcaaatcatcatgccctttatgacttgggctacacacgtactacaatggcgttaaacaaagagaagcaagaccgcgaggtggagcaaaactcagaaacaacgtcccagttcggactgcaggctgcaactcgcctgcacgaagtcggaattgctagtaatcgtggatcagcatgccacggtgaatacgttcccgggccttgtacacaccgcccgtcacaccatgagagccggggggacccgaagtcggtagtctaaccgcaaggaggacgccgccgaaggtaaaactggtgattgggg

SEQ ID NO: 3095 - DNA, 1370 bp, Artificial Sequence; identical to SEQ ID NO: 260
  Synthetic polymer

SEQ ID NO: 3096 - DNA, 1332 bp, Artificial Sequence; identical to SEQ ID NO: 814
  Synthetic polymer

SEQ ID NO: 3097 - DNA, 1381 bp, Artificial Sequence
  Synthetic polymer
ttcgcccttagagtttgatcctggctcaggacgaacgctgtcggcgcgcctaacacatgcaagtcgaacgagcgagagagagcttgctttctcaagcgagtggcgaacgggtgagtaacgcgtgaggaacctgcctcaaagagggggacaacagttggaaacgactgctaataccgcataagcccacaggtcggcatcgaccagagggaaaaggagcaatccgctttgagatggcctcgcgtccgattagctagttggtgaggtaatggcccaccaaggcaacgatcggtagccggactgagaggttgaacggccacattgggactgagacacggcccagactcctacgggaggcagcagtggggaatattgcacaatgggggaaaccttgatgcagcgacgccgcgtggaggaagaaggtcttcggattgtaaactcctgttgttgaggaagataatgacggtactcaacaaggaagtgacggctaactacgtgccagcagccgcggtaaaacgtaggtcacaagcgttgtccggaattactgggtgtaaagggagcgcaggcgggaagacaagttggaagtgaaatctatgggctcaacccataaactgctttcaaaactgtttttcttgagtagtgcagaggtaggcggaattcccggtgtagcggtggaatgcgtagatatcgggaggaacaccagtggcgaaggcggcctactgggcaccaactgacgctgaggctcgaaagtgtgggtagcaaacaggattagataccctggtagtccacaccgtaaacgatgattactaggtgttggaggattgaccccttcagtgccgcagttaacacaataagtaatccacctggggagtacgaccgcaaggttgaaactcaaaggaattgacgggggcccgcacaagcagtggagtatgtggattaattcgaagcaacgcgaagaaccttaccaggtcttgacatcgtatgcatagctcagagatgagtgaaatctcttcggagacatatagacaggtggtgcatggttgtcgtcagctcgtgtcgtgagatgttgggttaagtcccgcaacgagcgcaacccttactgttagttgctacgcaagagcactctagcaggactgccgttgacaaaacggaggaaggtggggatgacgtcaaatcatcatgccccttatgacctgggcctcacacgtactacaatggctgttaacagagggatgcaaagccgcgaggtggagcgaacccctaaaagcagtcttagttcggattgtaggctgcaacccgcctacatgaagtcggaattgctagtaatcgcagatcagcatgctgcggtgaatacgttcccgggccttgcacacaccgcccgtca

SEQ ID NO: 3098 - DNA, 1383 bp, Artificial Sequence; identical to SEQ ID NO: 417
  Synthetic polymer

SEQ ID NO: 3099 - DNA, 1373 bp, Artificial Sequence; identical to SEQ ID NO: 407
  Synthetic polymer

SEQ ID NO: 3100 - DNA, 1415 bp, Artificial Sequence; identical to SEQ ID NO: 930
  Synthetic polymer

SEQ ID NO: 3101 - DNA, 1371 bp, Artificial Sequence; identical to SEQ ID NO: 251
  Synthetic polymer

SEQ ID NO: 3102 - DNA, 1386 bp, Artificial Sequence; identical to SEQ ID NO: 220
  Synthetic polymer

SEQ ID NO: 3103 - DNA, 1418 bp, Artificial Sequence
  Synthetic polymer
aacgctggcggcgcgcctaacacatgcaagtcgaacgagcgagagagagcttgctttctcgagcgagtggcgaacgggtgagtaacgcgtgaggaacctgcctcaaagagggggacaacagttggaaacgactgctaataccgcataagcccacggctcggcatcgagcagagggaaaaggagtaatccgctttgagatggcctcgcgtccgattagctagttggtgaggtaatggcccaccaaggcgacgatcggtagccggactgagaggttgaacggccacattgggactgagacacggcccagactcctacgggaggcagcagtggggaatattgcacaatgggggaaaccctgatgcagcgacgccgcgtggaggaagaaggtcttcggattgtaaactcctgttgttggggaagataatgacggtacccaacaaggaagtgacggctaactacgtgccagcagccgcggtaaaacgtaggtcacaagcgttgtccggaattactgggtgtaaagggagcgcaggcgggaagacaagttggaagtgaaatctatgggctcaacccataaactgctttcaaaactgtttttcttgagtagtgcagaggtaggcggaattcccggtgtagcggtggaatgcgtagatatcgggaggaacaccagtggcgaaggcggcctactgggcaccaactgacgctgaggctcgaaagtgtgggtagcaaacaggattagataccctggtagtccacaccgtaaacgatgattactaggtgttggaggattgacccccttcgtgccgcagttaacacaataagttatcccacctggggagtacgacccgcaggttgaaactcaaaggaattgacgggggcccgcaccagccgtggagtatgtggtttaattcgacccaacccgaagacccttaccaaagtctggacatcccttgaccatgctggaaacagtatttctcttcggagcaaggagacaggtggtgcatggttgtcgtcagctcgtgtcgtgagatgttgggttaagtcccgcaacgagcgcaacccttatggtcagttactacgcaagaggactctggccagactgccgttgacaaaacggaggaaggtggggatgacgtcaaatcatcatgccctttatgacttgggctacacacgtactacaatggcgttaaacaaagagaagcaagaccgcgaggtggagcaaaactcagaaacaacgtcccagttcggactgcaggctgcaactcgcctgcacgaagtcggaattgctagtaatcgtggatcagcatgcgacggtgaatacgttcccgggccttgtacacgccgcccgtcacaccatgagagccggggggacccgaagtcggtaaaggaaccgcaaggaggacgccgccgaaggtaaaact

SEQ ID NO: 3104 - DNA, 1373 bp, Artificial Sequence; identical to SEQ ID NO: 243
  Synthetic polymer

SEQ ID NO: 3105 - DNA, 1427 bp, Artificial Sequence; identical to SEQ ID NO: 950
  Synthetic polymer

SEQ ID NO: 3106 - DNA, 1359 bp, Artificial Sequence
  Synthetic polymer
tgaacgctggcggcgtgcttaacacatgcaagtcgagcgaagcagttaagaagattcttcggatgaaacttgattgactgagcggcggacgggtgagtaacgcgtgggtgacctgccccataccgggggataacagctggaaacggctgctaataccgcataagcgcacagagctgcatggctcggtgtgaaaaactccggtggtatgggatgggcccgcgtctgattaggcagttggcggggtaacggcccaccaaaccgacgatcagtagccggactgagaggttgaacggccacattgggactgagacacggcccagactcctacgggaggcagcagtggggaatattgcacaatgggggaaaccctgatgcagcgacgccgcgtggaggaagaaggtcttcggattgtaaactcctgttgttgaggaagataatgacggtactcaacaaggaagtgacggctaactacgtgccagcagccgcggtaaaacgtaggtcacaagcgttgtccggaattactgggtgtaaagggagcgcaggcgggaagacaagttggaagtgaaatctatgggctcaacccataaactgctttcaaaactgtttttcttgagtagtgcagaggtaggcggaattcccggtgtagcggtggaatgcgtagatatcgggaggaacaccagtggcgaaggcggcctactgggcaccaactgacgctgaggctcgaaagtgtgggtagcaaacaggattagataccctggtagtccacaccgtaaacgatgattactaggtgttggaggattgaccccttcagtgccgcagttaacacaataagtaatccacctggggagtacgaccgcaaggttgaaactcaaaggaattgacgggggcccgcacaagcagtggagtatgtggtttaattcgacgcaacgcgaagaaccttaccaagtcttgacatcctgcggcgatgctggaaacagtattttccttcgggacgcagagacaggtggtgcatggttgtcgtcagctcgtgtcgtgagatgttgggttaagtcccgcaacgagcgcaacccttactgtcagttactacgcaagaggactctggcaggactgccgttgacaaaacggaggaaggtggggatgacgtcaaatcatcatgccctttatgacttgggctacacacgtactacaatggcgttaaacaaagagaagcaagaccgcgaggtggagcaaaactcagaaacaacgtcccagttcggactgcaggctgcaactcgcctgcacgaagtcggaattgctagtaatcgtggatcagcatgccacggtgaatacgttcccgggccttgcactcaccgcccgtca

SEQ ID NO: 3107 - DNA, 1340 bp, Artificial Sequence; identical to SEQ ID NO: 757
  Synthetic polymer

SEQ ID NO: 3108 - DNA, 1370 bp, Artificial Sequence
  Synthetic polymer
gtttgatcctggctcaggacgaacgctggcggcgtgcctaacacatgcaagttgaacggagttgaaaggagcttgcttttttcaactcagtggcggacgggtgagtaacgcgtgagtaacctgcctttcagagggggataacgttctgaaaagaacgctaataccgcataagcccacgggtcggcatcgaccagagggaaaaggagcaatccgctttgagatggcctcgcgtccgattagctagttggtgaggtaatggcccaccaaggcaacgatcggtagccggactgagaggttgaacggccacattgggactgagacacggcccagactcctacgggaggcagcagtggggaatattgcacaatgggggaaaccctgatgcagcgacgccgcgtggaggaagaaggtcttcggattgtaaactcctgttgttggggaagataatgacggtacccaacaaggaagtgacggctaactacgtgccagcagccgcggtaaaacgtaggtcacaagcgttgtccggaattactgggtgtaaagggagcgcaggcgggcgatcaagttggaagtgaaatccatgggctcaacccatgaactgctttcaaaactggtcgtcttgagtagtgcagaggtaggcggaattcccggtgtagcggtggaatgcgtagatatcgggaggaacaccagtggcgaaggcggcctactgggcaccaactgacgctgaggctcgaaagtgtgggtagcaaacaggattagataccctggtagtccacaccgtaaacgatgattactaggtgttgggagattgaccctctcagtgccgcagttaacacaataagtaatccacctggggagtacgaccgcaaggttgaaactcaaaggaattgacgggggcccgcacaagcagtggagtatgtggtttaattcgacgcaacgcgaagaaccttaccaagtcttgacatcctctgacgaacgtagaaatacgttttctcttcggagcagagagacaggtggtgcatggttgtcgtcagctcgtgtcgtgagatgttgggttaagtcccgcaacgagcgcaacccctattgttagttgctacgcaagagcactctagcgagactgccgttgacaaaacggaggaaggcggggacgacgtcaaatcatcatgccccttatgtcccgggctacacacgtaatacaatggcggtcaacagagggaagcaaagccgcgaggcagagcaaacccctaaaagccgtctcagttcggattgcaggctgcaactcgcctgcatgaagttggaattgctagtaatcgtggatcagcatgccacggtgaatacgttcccgggccttgtgcacacaccgcccgtca

SEQ ID NO: 3109 - DNA, 1377 bp, Artificial Sequence; identical to SEQ ID NO: 316
  Synthetic polymer

SEQ ID NO: 3110 - DNA, 1370 bp, Artificial Sequence; identical to SEQ ID NO: 584
  Synthetic polymer

SEQ ID NO: 3111 - DNA, 1350 bp, Artificial Sequence; identical to SEQ ID NO: 813
  Synthetic polymer

SEQ ID NO: 3112 - DNA, 1417 bp, Artificial Sequence; identical to SEQ ID NO: 1037
  Synthetic polymer

SEQ ID NO: 3113 - DNA, 1372 bp, Artificial Sequence
  Synthetic polymer
agagtttgatcctggctcaggacgaacgctggcggcgcgcctaacacatgcaagtcgaacggagtcaagaggagcttgcttttcttgacttagtggcgaacgggtgagtaacgcgtgaggaacctgtctcaaagagggggacaacagttggaaacgactgctaataccgcataagcccacgacccggcatcgggtagagggaaaaggagcaatccgctttgagatggcctcgcgtccgattagctagttggtgaggtaacggcccaccaaggcgacgatcggtagccggactgagaggttgaacggccacattgggactgagacacggcccagactcctacgggaggcagcagtggggaatattgcacaatgggggaaaccctgatgcagcgacgccgcgtggaggaagaaggtcttcggattgtaaactcctgttgttgaggaagataatgacggtactcaacaaggaagtgacggctaactacgtgccagcagccgcggtaaaacgtaggtcacaagcgttgtccggaattactgggtgtaaagggagcgcaggcgggaagacaagttggaagtgaaatccatgggctcaacccatgaactgctttcaaaactgtttttcttgagtagtgcagaggtaggcggaattcccggtgtagcggtggaatgcgtagatatcgggaggaacaccagtggcgaaggcggcctactgggcaccaactgacgctgaggctcgaaagtgtgggtagcaaacaggattagataccctggtagtccacaccgtaaacgatgattactaggtgttggaggattgaccccttcagtgccgcagttaacacaataagtaatccacctggggagtacgaccgcaaggttgaaactcaaaggaattgacgggggcccgcacaagcagtggagtatgtggtttaattcgacgcaacgcgaagaaccttaccaagtcttgacatcccttgacagacatagaaatatgttttctcttcggagcaaggagacaggtggtgcatggttgtcgtcagctcgtgtcgtgagatgttgggttaagtcccgcaacgagcgcaacccttattgccagttactacgtaagaggactctggcgagactgccgttgacaaaacggaggaaggtgggggtgacgtcaaatcatcatgccctttatgacctgggctacacacgtactacaatggcgtttaacaaagagaagcaagaccgcgaggcggagcaaaactcaaaaacaacgtcccagttcggactgcaggctgcaactcgcctgcacgaagtcggaattgctagtaatcgtggatcagcatgccacggtgaatacgttcccgggccttgtacacaccgcccgtca

SEQ ID NO: 3114 - DNA, 1388 bp, Artificial Sequence; identical to SEQ ID NO: 245
  Synthetic polymer

SEQ ID NO: 3115 - DNA, 1356 bp, Artificial Sequence
  Synthetic polymer
gacgaacgctggcggcgcgcctaacacatgcaagtcgaacgagagagagggagcttgcttcctcaatcgagtggcgaacgggtgagtaacgcgtgaggaacctgcctcaaagagggggacaacagttggaaacgactgctaataccgcataagcccacaggtcggcatcgaccagagggaaaaggagcaatccgctttgagatggcctcgcgtccgattagctagttggtgaggtaatggcccaccaaggcgacgatcggtagccggactgagaggttgaacggccacattgggactgagacacggcccagactcctacgggaggcagcagtggggaatattgcacaatgggggaaaccctgatgcagcgacgccgcgtggaggaagaaggtcttcggattgtaaactcctgttgttgaggaagataatgacggtactcaacaaggaagtgacggctaactacgtgccagcagccgcggtaaaacgtaggtcacaagcgttgtccggaattactgggtgtaaagggagcgcaggcgggaagacaagttggaagtgaaatctatgggctcaacccataaactgctttcaaaactgtttttcttgagtagtgcagaggtaggcggaattcccggtgtagcggtggaacgcgtagatatcgggaggaacaccagtggcgaaggcggcctactgggcaccaactgacgctgaggctcgaaagtgtgggtagcaaacaagattaaaatccctggttagtccacaccctaaacaaagaataaagggagtgttggagagattgacccctttcagtgccgcagttaacacaataagtaatccaccctggggggtgggcccgcaaggttgaaactcaaaggaattgacgggggcccgcacaagcagtggagtatgtggtttaatttgacgcaacgcgaagaacctaccaagttcttgacatcctgcgacggacatagaaatatgtctttccctcgggacgcagagacaggtggtgcatggttgtcgtcagctcgtgtcgtgagatgttggggtaagtcccgcaacgagcgcaacccttactgtcagttactacgcaagaggactctggcaggactgccgttgacaaaacggaggaaggtggggaggacgtcaaatcatcatgccctctatgacttgggctacacacgtactacaatggcgttaaacaaagagaagcaagaccgcgaggtggagcaaaactcagaaacaacgtcccagttcggagtgcaggctgcaactcgcctgcacgaagtcggaattgctagtaatcgtggatcagcatgccacggtgaataaggggccgggccttgcacacaccgcctgtca

SEQ ID NO: 3116 - DNA, 1359 bp, Artificial Sequence; identical to SEQ ID NO: 788
  Synthetic polymer

SEQ ID NO: 3117 - DNA, 1370 bp, Artificial Sequence
  Synthetic polymer
ttcgcccttagagtttgatcctggctcaggatgaacgctggcggcgtgcctaacacatgcaagtcgagcgattctcttcggagaagagcggcggacgggtgagtaacgcgtgggtaacctgccctgtacagggggataacagctggaaacggctgctaataccgcataagcgcacgaggagacatctccttgtgtgaaaaactccggtggtacaggatggcctcgcgtccgattagctagttggtgaggtaatggcccaccaaggcaacgatcggtagccggactgagaggttgaacggccacattgggactgagacacggcccagactcctacgggaggcagcagtggggaatattgcacaatgggggaaaccctgatgcagcgacgccgcgtggaggaagaaggtcttcggattgtaaactcctgttgttgaggaagataatgacggtactcaacaaggaagtgacggctaactacgtgccagcagccgcggtaaaacgtaggtcacaagcgttgtccggaattactgggtgtaaagggagcgcaggcgggaagacaagttggaagtgaaatctatgggctcaacccataaactgctttcaaaactgtttttcttgagtagtgcagaggtaggcggaattcccggtgtagcggtggaatgcgtagatatcgggaggaacaccagtggcgaaggcggcctactgggcaccaactgacgctgaggctcgaaagtgtgggtagcaaacaggattagataccctggtagtccacaccgtaaacgatgattactaggtgttggaggattgaccccttcagtgccgcaagtttacactttaagtaatcccaccggggggaggtacgaccgcaaggttgaaactcaatggaattgacgggggcccgcacaagcagcggagtacgtggttttaattcgacgcaacgcgaagaaccttaccaagtcttgacatcctgcgacgatgctggaaacagtattttccttcgggacgcagagacaggtggtgcatggttgtcgtcagctcgtgtcgtgagatgttgggttaagtcccgcaacgagcgcaacccttactgtcagttactacgcaagaggactctggcaggactgccgttgacaaaacggaggaaggtggggatgacgtcaaatcatcatgccctttatgacttgggctacacacgtactacaatggcgttaaacaaagagaagcaagaccgcgaggtggagcaaaactcagaaacaacgtcccagttcggactgcaggctgcaactcgcctgcacgaagtcggaattgctagtaatcgtggatcagcatgccacggtgaatacgttcccgggccttgcacacaccgcccgtca

SEQ ID NO: 3118 - DNA, 1393 bp, Artificial Sequence
  Synthetic polymer
tggcggcgcgcctaacacatgcaagtccaacgatcgagagagagcttgctttctcgagcgagtggcaaacgggtgagtaacgcgtgaggaacctgcctcaaagagggggacaacagttggaaactgactgctaataccgcataagcccacgacccggcatcgggttgagggaaaaggagcaatccgctttgagatggcctcgcgtccgattatctagttggtgaggtaacggcccaccaaggcgaccatcggtagccggactgaaaggttgaacggccacattgggactgatacacggcccacactcctaccggaggcatcactggggaatattgcacaatgggggaaaccctgatgcatcgacgccgcgtggagggagaaggtcttcggattgtaaactcctgttgttgaggaagataatgacggtactcaacaaggaagtgacggctaactacatgccaccagccgcggtaaaacgtaggtcacaagcgttgtccggaattactgggtgtaaagggagcgcaggcggaaagacaagttggaagtgaaatccatgggctcaacccatgaactgctttcaaaactgtttttcttgactagtgcagaggtatgcggaattcccggtgtagcggtggaatgcgtagatatcgggaggaacaccagtggcgaaggcggcctactgggcaccaactgacgctgaggctcgaaagtgtgggtagcaaacaggattagataccttggtagtccacactcgtaaacgatgattactaggtgttggaggattgacccattcagtgccgcagttaacacaataagtaatccacgtggggagtacgaccgcaaggttgaaactcaaaggaattgatgggggcccgcacaagcagtggagtatgtggtttaatttgacgcaacgcgaagaaccttaccaagtcttgacatcctgcgacggtgccggaaacagtattttccttcgggacgcagagacaggtggttcatggttgttgtcagctggtgtcgtgagatgttgggttaagtcccgcaacgagcgcaacccttatggtcagttactacgcaagaggactctggccagactgccgttgacaaatcggaggaaggtggggatgacgtcaaatcatcatgccctttatgacttgggctacacacgtactacaatggcgttaaacaaagagaagcaagacctcgaggtggagcaaaactcagaaacaacgttccagttcggactgcaggctgcaactcgcgtgcaagaagtcggaatcggtagtaatcgtggatcagcatgccacggtgaatacgttcccgggccttgtacacaccgcccgtcacaccattagagccggggggaccggaagtcggtagtctaaccgcaaggagg

SEQ ID NO: 3119 - DNA, 1385 bp, Artificial Sequence; identical to SEQ ID NO: 441
  Synthetic polymer

SEQ ID NO: 3120 - DNA, 1372 bp, Artificial Sequence
  Synthetic polymer
agagtttgatcctggctcaggacgaacgctggcggcgcgcctaacacatgcaagtcgaacgagcgagacagagcttgctttctcgagcgagtggcgaacgggtgagtgacgcgtgaggaacctgcctcagaggagggggacaaccgttcggaaacgactgctaataccgcataagcccacgggtcggcatccaccagagggaaaaggagcaatccgctttgagatggcctcgcgtccgattagctagttggtgaggtaacggcccaccaaggcaacgatcggtagccggactgagaggttgaacggccacattgggactgagacacggcccagactcctacgggaggcagcagtggggaatattgcacaatgggggaaaccctgatgcagcgacgccgcgtggaggaagaaggtcttcggattgtaaactcctgttgttggggaagataatgacggtacccaacaaggaagtgacggctaactacgtgccagcagccgcggtaaaacgtaggtcacaagcgttgtccggaattactgggtgtaaagggagcgcaggcgggacgacaagttggaagtgaaatctatgggctcaacccataaactgctttcaaaactgtttttcttgagtactgcagaggtaggcggaattcccggtgtagcggtggaatgcgtagatatcgggaggaacaccagtggcgaaggcggcctactgggcaccaactgacgctgaggctcgaaagtgtgggtagcaaacaggattagataccctggtagtccacaccgtaaacgatgattattaggtgtcggaggcttgaccccttccgtcccgcactttacacaataagtaatccacctggggagtccggccgcaaggttgaaactcaaaggaattgccggcgccccgcacaagcagtggagtatgtgttttaattagacgcaacgcgaagacccttaccaagtcttgacatccctatccagacatagatatatctaatctcttcggagcaaggagacaggcggtgcatggttgtcgtcagctcgtgtcgtgagatgttgggttaagtcccgcaacgagcgcaacccttctggtcagttcatacgcaagaggcctttggccggactgcccttgacaaaacggaggaaggtggggatgacgtcaaatcatcatgccccttatgacttgggctacccacgtagtacaatggcgttaaacaaagagaagcaagaccgcgaggtggagcaaatctcagaaacaacgtcccagttcggactgcagtctgcaactcgcctgcacgaagtcggaattgctagtaatcgtggatcagcatgccacggtgaatacgttcccgggccttgcactcaccgcccgtca

SEQ ID NO: 3121 - DNA, 1421 bp, Artificial Sequence; identical to SEQ ID NO: 1061
  Synthetic polymer

SEQ ID NO: 3122 - DNA, 1373 bp, Artificial Sequence; identical to SEQ ID NO: 651
  Synthetic polymer

SEQ ID NO: 3123 - DNA, 1378 bp, Artificial Sequence; identical to SEQ ID NO: 821
  Synthetic polymer
  misc_feature (626)..(626): n is a, c, g, or t

SEQ ID NO: 3124 - DNA, 1475 bp, Artificial Sequence; identical to SEQ ID NO: 477
  Synthetic polymer

SEQ ID NO: 3125 - DNA, 1372 bp, Artificial Sequence; identical to SEQ ID NO: 120
  Synthetic polymer

SEQ ID NO: 3126 - DNA, 1403 bp, Artificial Sequence; identical to SEQ ID NO: 938
  Synthetic polymer

SEQ ID NO: 3127 - DNA, 1386 bp, Artificial Sequence; identical to SEQ ID NO: 211
  Synthetic polymer

SEQ ID NO: 3128 - DNA, 1370 bp, Artificial Sequence; identical to SEQ ID NO: 661
  Synthetic polymer

SEQ ID NO: 3129 - DNA, 1356 bp, Artificial Sequence
  Synthetic polymer
cctggctcaggacgaacgctggcgacgcgcctaacacatgcaagtcgaacgagcgagaggacgtttactttctctagcgagtggcgaacgggcgagtaacgcgtgaagaacctgcctcacagagggggactagagttggaaccgactgctaatacagcataaccccacgacccggcttcgggtagagggaaaaagagcaatccgctttgagatggcctcgcgtccgattatctagttggtgaggtaatggcccaccaaggcgacgatcggtagccggactgataggttgaacggccaccttgggactgagacacggcccagactcctacgggaggcagcagtggggaatattgcactatgggggaaaccctgatgcagcgacgccgcgtggaggaagaaggtcttcggactgtaaactcctgtcggtgaggaagataatgacggtactcaacaaggaagtgacggctaactacgtgccagcagccgcggtaaaacgtaggtcacaagcgttgtccggaattactgggtgtaaagggagcgcaggcggtaagacaagttggaagtgaaatccatgggctcaacccatgaactgctttcaaaactgtttttcttgagtagtgcagaggtaggcggaattcccggtgtagcggtggaatgcgtagatatcgggaggaacaccagtggcgaaggcggcttactgggcaccaactgacgctgaggctagaaagtgtgtgtagcaaacaggattagatacgttggtagtacacaccgtaaacgatgattactaggtgttggaggattgaacccttcagtgccgcatataacacaataagtaatccaagtggggagtacgaccgcaaggttgaaactcaaaggaattgacgggggcccgcacaagcagtggagtatgtggtttaattagacgcaacgcgaagaaccttaccaagtcttggcatcatgcgacgcacatagaaatatgtgtttcgttcgggacgcagagacagatggtgcatggtagtcgtcagctcgagtcgtgagatgttgggttaagtcgagcaacgagcgcaacccttatggtcagttagtacagcaagaggactctggccagactgccgttgtcaaaacggaggaaggtggggatgacgtcaaatcatcatgccctttatgtccggggctacacacgtgttacaatggcgggaaccaaagagaagcaagaccgagaggtggagcaaaactcagaaacaatgtcacagttgggactgcaggctgcaactcgcccgcgagaagtgggaatttatagtaatcgcagatcaccaggctgcggtgaataggttcccggccttggtacacaccgcc

SEQ ID NO: 3130 - DNA, 1387 bp, Artificial Sequence; identical to SEQ ID NO: 160
  Synthetic polymer

SEQ ID NO: 3131 - DNA, 1375 bp, Artificial Sequence; identical to SEQ ID NO: 383
  Synthetic polymer

SEQ ID NO: 3132 - DNA, 1340 bp, Artificial Sequence; identical to SEQ ID NO: 765
  Synthetic polymer

SEQ ID NO: 3133 - DNA, 1426 bp, Artificial Sequence; identical to SEQ ID NO: 1048
  Synthetic polymer

SEQ ID NO: 3134 - DNA, 1431 bp, Artificial Sequence; identical to SEQ ID NO: 955
  Synthetic polymer

SEQ ID NO: 3135 - DNA, 1367 bp, Artificial Sequence; identical to SEQ ID NO: 710
  Synthetic polymer

SEQ ID NO: 3136 - DNA, 1341 bp, Artificial Sequence; identical to SEQ ID NO: 749
  Synthetic polymer

SEQ ID NO: 3137 - DNA, 1429 bp, Artificial Sequence
  Synthetic polymer
gatgaacgctggcggcgtgcttaacacatgcaagtcgaacgattaacccgccctcgggcggttatagagtggcgaacgggtgagtaacacgtgaccaacctgccccttgctccgggacaacccagggaaacctcggctaataccggatactccgcgcagcccgcatgggaggcgcgggaaagcccagacggcaagggatggggtcgcggcccattaggtagacggcggggtaatggcccaccaagacgacgatcggtagccggactgagaggttgaacggccacattgggactgagacacggcccagactcctacgggaggcagcagtggggaatattgcacaatgggggaaaccctgatgcagcgacgccgcgtggaggaagaaggtcttcggattgtaaactcctgttgttggggaagataatgacggtacccaacaaggaagtgacggctaactacgtgccagcagccgcggtaaaacgtaggtcacaagcgttgtccggaattactgggtgtaaagggagcgcaggcgggaagacaagttggaagtgaaatctatgggctcaacccataaactgctttcaaaactgtttttcttgagtagtgcagaggtaggcggaattcccggtgtagcggtggaatgcgtagatatcgggaggaacaccagtggcgaaggcggcctactgggcaccaactgacgctgaggctcgaaagtgtgggtagcaaacaggattagataccctggtagtccacaccgtaaacgatgattactaggtgttggaggattgaccccttcagtgccgcagttaacacaataagtaatccacctggggagtacgaccgcaaggttgaaactcaaaggaattgacgggggcccgcacaagcagtggagtatgtggtttaattcgacgcaacgcgaagaaccttaccaagtcttgacatcccttgacagacatagaaatatgtaatctcttcggagcaaggagacaggtggtgcatggttgtcgtcagctcgtgtcgtgagatgttgggttaagtcccgcaacgagcgcaacccttatggtcagttactacgcaagaggactctggccagactgccgttgacaaaacggaggaaggtggggatgacgtcaaatcatcatgccctttatgacttgggctacacacgtactacaatggcgttaaacaaagagaagcgagaccgcgaggtggagcaaaactcagaaacaacgtcccagttcggactgcaggctgcaactcgcctgcacgaagtcggaattgctagtaatcgtggatcagcatgccacggtgaatacgttcccgggccttgtacacaccgcccgtcacaccatgagagccggggggacccgaagtcggtagtctaaccgcaaggaggacgccgccgaaggtaaaactggtgattggggtg

SEQ ID NO: 3138 - DNA, 1352 bp, Artificial Sequence; identical to SEQ ID NO: 758
  Synthetic polymer

SEQ ID NO: 3139 - DNA, 1428 bp, Artificial Sequence
  Synthetic polymer
ggcgcgcctaacacatgcaagtcgaacgagagagaagaagcttgcttcttcgatcgagtggcgaacgggtgagtaacgcgtgaggaacctgcctcaaagagggggacaacagttggaaacgactgctaataccgcataagcccacgggtcggcatcgacctgagggaaaaggagcaatccgctttgagatggcctcgcgtccgattagctagttggtgaggtaacggcccaccaaggcgacgatcggtagccggactgagaggttgaacggccacattgggactgagacacggcccagactcctacgggaggcagcagtggggaatattgcacaatgggggaaaccctgatgcagcgacgccgcgtggaggaagaaggtcttcggattgtaaactcctgttgttgaggaagataatgacggtactcaacaaggaagtgacggctaactacgtgccagcagccgcggtaaaacgtaggtcacaagcgttgtccggaattactgggtgtaaagggagcgcaggcgggaagacaagttggaagtgaaatctatgggctcaacccataaactgctttcaaaactgtttttcttgagtagtgcagaggtaggcggaattcccggtgtagcggtggaatgcgtagatatcgggaggaacaccagtggcgaaggcggcctactgggcaccacctgacgctgaggctcgaaagtgtgggtagcaaacaggattaaatacccctggtagtccacacccgtaaacgatgattactaggtgttggagggattgaccccttcagtgccccagttaacacaataagtaaatccccctgggggagtaccaaccgcaggttgaaacccaaaggaattgacgggggggcccggcacaaccagtggagtatgtggtttaaattcgacgcaaggggaagaaccttaccaagtcttgacatccctggaggaacatagaaatatgttttcttttcggagccaaggaaacaggtggtgcatggttgtcgtccagctggggtcgtgagatgtggggttaagtcccgcaacgagcgcaaacccttatgggtcagttactacgcaagaggactctggccagactgccgttgacaaaacggaggaaggtggggatgacgtcaaatcatcatgccctttatgacttgggctacacacgtactacaatggcgttaaacaaagagaagcaagaccgcgaggtggagcaaaactcagaaacaacgtcccagttcggactgcaggctgcaactcgcctgcacgaagtcggaattgctagtaatcgtggatcagcatgccacggtgaatacgttcccgggccttgtacacaccgcccgtcacaccatgagagccggggggacccgaagtcggtagtctaaccgcaaggaggacgccgccgaaggtaaaactggtgattg

SEQ ID NO: 3140 - DNA, 1372 bp, Artificial Sequence; identical to SEQ ID NO: 323
  Synthetic polymer

SEQ ID NO: 3141 - DNA, 1345 bp, Artificial Sequence; identical to SEQ ID NO: 767
  Synthetic polymer

SEQ ID NO: 3142 - DNA, 1376 bp, Artificial Sequence; identical to SEQ ID NO: 331
  Synthetic polymer

SEQ ID NO: 3143 - DNA, 1367 bp, Artificial Sequence; identical to SEQ ID NO: 820
  Synthetic polymer

SEQ ID NO: 3144 - DNA, 1418 bp, Artificial Sequence; identical to SEQ ID NO: 987
  Synthetic polymer

SEQ ID NO: 3145 - DNA, 1368 bp, Artificial Sequence; identical to SEQ ID NO: 43
  Synthetic polymer

SEQ ID NO: 3146 - DNA, 1371 bp, Artificial Sequence; identical to SEQ ID NO: 238
  Synthetic polymer

SEQ ID NO: 3147 - DNA, 1367 bp, Artificial Sequence
  Synthetic polymer
agagtttgatcctggctcagattgaacgctggcggcaggcctaacacatgcaagtcgagcggatgatgggagcttgctcccggattcagcggcggacgggtgagtaatgcctaggaatctgcctggtagtgggggacaacgtttcgaaaggaacgctaataccgcataagcccacgacccggcatcgggttgagggaaaaggagcaatccgctttgagatggcctcgcgtccgattagctagttggtgaggtaacggcccaccaaggcaacgatcggtagccggactgagaggttgaacggccacattgggactgagacacggcccagactcctacgggaggcagcagtggggaatattgcacaatgggggaaaccctgatgcagcgacgccgcgtggaggaagaaggtcttcggattgtaaactcctgttgttgaggaagataatgacggtactcgacaaggaagtgacggctaactacgtgccagcagccgcggtaaaacgtaggtcacaagcgttgtccggaattactgggtgtaaagggagcgcaggcgggaagacaagttggaagtgaaatctatgggctcaacccataaactgctttcaaaactgtttttcttgagtagtgcagaggtaggcggaattcccggtgtagcggtggaatgcgtagatatcgggaggaacaccagtggcgaaggcggcctactgggcaccaactgacgctgaggctcgaaagtgtgggtagcaaacaggattagataccctggtagtccacaccgcaaacgatgattactaggtgttggaggattgaccccttcagtgccgcagttaacacaataagtaatccacctggggagtacgaccgcaaggttgaaactcaaaggaattgacgggggcccgcgcaagcagtggagtatgtggtttaattcgacgcaacgcgaagaaccttaccaagtcttgacatcctgcgacgatgctggaaacagtattttccttcgggacgcagagacaggtggtgcatggttgtcgtcagctcgtgtcgtgagatgttgggttaagtcccgcaacgagcgcaacccttactgtcagttactacgcaagaggactctggcaggactgccgttgacaaaacggaggaaggtggggatgacgtcaaatcatcatgccctttatgacttgggctacacacgtactacaatggcgttaaacaaagagaagcaagaccgcgaggtggagcaaaactcagaaacaacgtcccagttcggactgcaggctgcaactcgcctgcacgaagtcggaattgctagtaatcgtggatcagcatgccacggtgaatacgttcccgggccttgcacacaccgcccgtca

SEQ ID NO: 3148 - DNA, 1374 bp, Artificial Sequence
  Synthetic polymer
agagtttgatcctggctcaggacgaacgctggcggcgcgcctaacacatgcaagtcgaacgagcgagagagagcttgctttctcgagcgagtggcgaacgggtgagtaacgcgtgaggaacctgcctcaaagagggggacaacagttggaaacgactgctaataccgcataagcccacggctcggcatcgagcagagggaaaaggagcaatccgctttgagatggcctcgcgtccgattagctagttggtgaggtaatggcccaccaaggcaacgatcggtagccggactgagaggttgaacggccacattgggactgagacacggcccagactcctacgggaggcagcagtggggaatatcgcacaatgggggaaaccctgatgcagcgacgccgcgtggaggaagaaggtcttcggattgtaaactcctgttgttgaggaagataatgacggtactcaacaaggaagtgacggctaactacgtgccagcagccgcggtaaaacgtaggtcacaagcgttgtccggaattactgggtgtaaagggagcgcaggcgggaagacaagttggaagtgaaatctatgggctcaacccataaactgctttcaaaactgtttttcttgagtagtgcagaggtaggcggaattcccggtgtagcggtggaatgcgtagatatcgggaggaacaccagtggcgaaggcggcctactgggcaccaactgacgctgaggctcgaaagtgtgggtagcaaacaggattagacacccgggtagtccacactgtaaacgatgattgctaggtgtggggggtctgaccccctccgtgccggagttaacgcaataagcaatccacctggggagtacggccgcaaggttgaaactcaaaggaattgacggggacccgcacaagcagtggattatgtggtttaattcgaagcaacgcgaagaaccttaccagggcttgacatccaactaacgaagcagagatgcattaggtgcccttcggggaaagttgagacaggtggtgcatggttgtcgtcagctcgtgtcgtgagatgttgggttaagtcccgcaacgagcgcaacccctattgttagttgctacgcaagagcactctagcgagactgccgttgacaaaacggaggaaggtggggacgacgtcaaatcatcatgccccttatgtcctgggctacacacgtaatacaatggcatttaacagagggaagcaaaaccgcgaggtggagcaaatccctaaaaggtgtctcagttcggattgcaggctgcaactcgcctgcatgaagtcggaattgctagtaatcgcggatcagcatgccgcggtgaatacgttcccgggccttgcacacaccgcccgtca

SEQ ID NO: 3149 - DNA, 1380 bp, Artificial Sequence
  Synthetic polymer
ttcgcccttagagtttgatcctggctcaggatgaacgctggcggcgtgcttaacacatgcaagtcgaacgattgaagctggagcttgctccggccgatttagtggcggacgggtgagtaacgcgtgggtaacctgcctcatacagggggatagcagttggaaacgactggtaaaaccgcataagcgcacggtatcgcatgatacagtgtgaaaacactccggtggtatgagatggacccgcgtctgattagctagttggtgaggtaacggcccaccaaggcgacgatcagtagccggcctgagagggtgaacggccacattgggactgagacacggcccaaactcctacgggaggcagcagtggggaatattgcacaatgggggaaaccctgatgcagcgacgccgcgtggaggaagaaggtcttcggattgtaaactcctgttgttgaggaagataatgacggtactcaacaaggaagtgacggctaactacgtgccagcagccgcggtaaaacgtaggtcacaagcgttgtccggaattactgggcgtaaagggagcgcaggcgggaagacaagttggaagtgaaatctatgggctcaacccataaactgctttcaaaactgtttttcttgagtagtgcagaggtaggcggaattcccggtgtagcggtggaatgcgtagatatcgggaggaacaccagtggcgaaggcggcctactgggcaccaactgacgctgaggctcgaaagtgtgggtagcaaacaggattagataccctggtagtccacaccgtaaacgatgattactaggtgttggaggattgaccccttcagtgccgcagttaacacaataagtaatccacctggggagtacgaccgcaaggttgaaactcaaaggaattgacgggggcccgcacaagcagtggagtatgtggtttaattcgacgcaacgcgaagaaccttaccaagtcttgacatcctgcgacgcacataaaaatatgtgtttccttcgggacgcagagacaggtggtgcatggttgtcgtcagctcgtgtcgtgagatgttgggttaagtcccgcaacgagcgcaacccttactgtcagttactacgcaagaggactctggcaggactgccgttgacaaaacggaggaaggtggggatgacgtcaaatcatcatgccctttatgacttgggctacacacgtactacaatggcgttaaacaaagtgaagcgagacagtgatgttaagcaaagcacaaaaacagtgtcccagttcggattgtagtctgcaactcgactacatgaagccggaatcgctagtaatcgcagatcagcatgctgcggtgaatacgttcccgggtcttgtacacaccgcccgtca

SEQ ID NO: 3150 - DNA, 1380 bp, Artificial Sequence; identical to SEQ ID NO: 95
  Synthetic polymer

SEQ ID NO: 3151 - DNA, 1363 bp, Artificial Sequence; identical to SEQ ID NO: 85
  Synthetic polymer
  misc_feature (1171)..(1171): n is a, c, g, or t
  misc_feature (1253)..(1253): n is a, c, g, or t
  misc_feature (1263)..(1263): n is a, c, g, or t

SEQ ID NO: 3152 - DNA, 1452 bp, Artificial Sequence; identical to SEQ ID NO: 61
  Synthetic polymer

SEQ ID NO: 3153 - DNA, 1366 bp, Artificial Sequence; identical to SEQ ID NO: 823
  Synthetic polymer

SEQ ID NO: 3154 - DNA, 1337 bp, Artificial Sequence; identical to SEQ ID NO: 790
  Synthetic polymer

SEQ ID NO: 3155 - DNA, 1370 bp, Artificial Sequence; identical to SEQ ID NO: 817
  Synthetic polymer

SEQ ID NO: 3156 - DNA, 1428 bp, Artificial Sequence; identical to SEQ ID NO: 1000
  Synthetic polymer

SEQ ID NO: 3157 - DNA, 1380 bp, Artificial Sequence; identical to SEQ ID NO: 228
  Synthetic polymer

SEQ ID NO: 3158 - DNA, 1448 bp, Artificial Sequence
  Synthetic polymer
gacgaacgctggcggcgtgcctaacacatgcaagtcgagcggggattaccggatgaagttttcggatggaatctggtaattctagcggcggacgggtgggtaacgcgtgagcaacctgcctctcacagggggataacgcagcgaaagttgcactaataccgcatgagaccacgcttctgacatgggagaggggtcaaaggagcaatccggtgagagatgggctcgcgtctgattagctggttggtgaggtaacggcccaccaaggcgacgatcggtagccggactgagaggttgaacggccacattgggactgagacacggcccagactcctacgggaggcagcagtggggaatattgcacaatggaggaaactctgatgcagcgacgccgcgtggaggaagaaggtcttcggattgtaaactcctgttgttgaggacgataatgacggtactcaacaaggaagtgacggctaactacgtgccagcagccgcggtaaaacgtaggtcacaagcgttgtccggaattactgggtgtaaagggagcgcaggcgggaatgcaagttgggagtgaaatctacgggctcaacccgtaaactgctctcaaaactgtatttcttgagtagtgcagaggtaggcggaattcccggtgtagcggtggaatgcgtagatatcgggaggaacaccagtggcgaaggcggcctactgggcaccgactgacgctgaggctcgaaagtgtgggtagcaaacaggattagataccctggtagtccacaccgtaaacgatgattactaagtgttgggagattgaccctctcagtgccgcagttaacacaataagtaatccacctggggagtacgaccgcaaggttgaaactcaaaggaattgacgggggcccgcacaagcagtggagtatgtggtttaattcgacgcaacgcgaagaaccttaccaagtcttgacatcctgcggcgagtacagaaatgcacttttccttcgggacgcagagacaggtggtgcatggttgtcgtcagctcgtgtcgtgagatgttgggttaagtcccgcaacgagcgcaacccttatggatagttactacgcaagaggactctattcagactgccgttgacaaaacggaggaaggtgaggatgacgtcaaatcatcatgccctttatgacttgggctacacacgtactacaatggcgttaaacaaagagaagcgagaccgcgaggtggagcaaaactcaaaaacaacgtcccagttcagactgcaggctgcaactcgcctgcacgaagtcggaattgctagtaatcgcagatcagcatgccgcggtgaatacgttcccgggccttgtacacaccgcccgtcacaccatgagagccggggggacccgaagtcggtagtctaaccgcaaggaggacgccgccgaaggtaaaactggtgattggggtg

SEQ ID NO: 3159 - DNA, 1338 bp, Artificial Sequence; identical to SEQ ID NO: 784
  Synthetic polymer

SEQ ID NO: 3160 - DNA, 1413 bp, Artificial Sequence; identical to SEQ ID NO: 2558
  Synthetic polymer

SEQ ID NO: 3161 - DNA, 1386 bp, Artificial Sequence; identical to SEQ ID NO: 805
  Synthetic polymer

SEQ ID NO: 3162 - DNA, 1458 bp, Artificial Sequence; identical to SEQ ID NO: 2570
  Synthetic polymer

SEQ ID NO: 3163 - DNA, 1339 bp, Artificial Sequence; identical to SEQ ID NO: 350
  Synthetic polymer

SEQ ID NO: 3164 - DNA, 1357 bp, Artificial Sequence; identical to SEQ ID NO: 774
  Synthetic polymer

SEQ ID NO: 3165 - DNA, 1384 bp, Artificial Sequence; identical to SEQ ID NO: 373
  Synthetic polymer

SEQ ID NO: 3166 - DNA, 1367 bp, Artificial Sequence; identical to SEQ ID NO: 324
  Synthetic polymer

SEQ ID NO: 3167 - DNA, 1371 bp, Artificial Sequence; identical to SEQ ID NO: 371
  Synthetic polymer

SEQ ID NO: 3168 - DNA, 1371 bp, Artificial Sequence; identical to SEQ ID NO: 280
  Synthetic polymer

SEQ ID NO: 3169 - DNA, 1332 bp, Artificial Sequence; identical to SEQ ID NO: 748
  Synthetic polymer

SEQ ID NO: 3170 - DNA, 1365 bp, Artificial Sequence; identical to SEQ ID NO: 563
  Synthetic polymer

SEQ ID NO: 3171 - DNA, 1342 bp, Artificial Sequence; identical to SEQ ID NO: 2596
  Synthetic polymer

SEQ ID NO: 3172 - DNA, 1365 bp, Artificial Sequence; identical to SEQ ID NO: 2598
  Synthetic polymer

SEQ ID NO: 3173 - DNA, 1364 bp, Artificial Sequence; identical to SEQ ID NO: 2599
  Synthetic polymer

SEQ ID NO: 3174 - DNA, 1365 bp, Artificial Sequence; identical to SEQ ID NO: 2603
  Synthetic polymer

SEQ ID NO: 3175 - DNA, 1330 bp, Artificial Sequence; identical to SEQ ID NO: 104
  Synthetic polymer

SEQ ID NO: 3176 - DNA, 1469 bp, Artificial Sequence; identical to SEQ ID NO: 51
  Synthetic polymer

SEQ ID NO: 3177 - DNA, 1409 bp, Artificial Sequence; identical to SEQ ID NO: 1131
  Synthetic polymer

SEQ ID NO: 3178 - DNA, 1385 bp, Artificial Sequence; identical to SEQ ID NO: 804
  Synthetic polymer

SEQ ID NO: 3179 - DNA, 1416 bp, Artificial Sequence; identical to SEQ ID NO: 934
  Synthetic polymer

SEQ ID NO: 3180 - DNA, 1345 bp, Artificial Sequence; identical to SEQ ID NO: 770
  Synthetic polymer

SEQ ID NO: 3181 - DNA, 1351 bp, Artificial Sequence; identical to SEQ ID NO: 337
  Synthetic polymer

SEQ ID NO: 3182 - DNA, 1366 bp, Artificial Sequence; identical to SEQ ID NO: 2624
  Synthetic polymer

SEQ ID NO: 3183 - DNA, 1365 bp, Artificial Sequence; identical to SEQ ID NO: 687
  Synthetic polymer

SEQ ID NO: 3184 - DNA, 1330 bp, Artificial Sequence; identical to SEQ ID NO: 789
  Synthetic polymer

SEQ ID NO: 3185 - DNA, 1373 bp, Artificial Sequence; identical to SEQ ID NO: 294
  Synthetic polymer
